(19) United States
(12) Patent Application Publication
(10) Pub. No.: US 2023/0406929 A1
(43) Pub. Date: Dec. 21, 2023

(54) POLYPEPTIDE CONSTRUCTS BINDING TO CD3

(71) Applicants: AMGEN INC., Thousand Oaks, CA (US); AMGEN RESEARCH (MUNICH), Munich (DE)

(72) Inventors: Doris Rau, Munich (DE); Tobias Raum, Munich 81477 (DE); Partrick Hoffmann, Munich (DE); Markus Muenz, Munich (AD); Matthias Klinger, Munich (DE); Virginie Naegele, Munich (DE); Lisa Winkel, Munich (DE); Pavan Ghattyvenkatakrishna, Thousand Oaks, CA (US); Joon Hoi Huh, Thousand Oaks, CA (US); Arnold McAuley, Thousand Oaks, CA (US); Sekhar Kanapuram, Thousand Oaks, CA (US)

(21) Appl. No.: 18/251,120

(22) PCT Filed: Nov. 8, 2021
(86) PCT No.: PCT/EP2021/080859

§ 371 Date: Apr. 28, 2023

Related U.S. Application Data
(60) Provisional application No. 63/110,545, filed on Nov. 6, 2020.

(51) Int. Cl. C07K 16/28

(52) U.S. Cl. CPC C07K 16/2809; C07K 16/2875; C07K 2317/31; C07K 2317/622; C07K 2317/73; C07K 2317/94; C07K 2317/92

(57) ABSTRACT

The invention relates to a polypeptide or polypeptide construct comprising: a binding domain binding to an extracellular epitope of the human CD3s chain comprising or consisting of a VH region and a VL region, wherein i) the VH region comprises: a CDR-H1 sequence of X₁YAX₂N, where X1 is K, V, S, G, R, T, or I; and X₂ is M or I; a CDR-H2 sequence of RIRSKYNNYATYYADX₁VKX₂, where X₁ is S or Q; and X₂ is D, G, K, S, or E; and a CDR-H3 sequence of HX₁NFGNSYX₂SX₃X₄AY, where X₁ is G, R, or A; X₂ is I, L, V, or T; X₃ is Y, W or F; and X₄ is W, F or Y; and ii) wherein the VL region comprises: a CDR-L1 sequence of X₁ SSTGAVTX₂X₃X₄YX₅N, where X₁ is G, R, or A; X₂ is S or T; X₃ is G or S; X₄ is N or Y and X₅ is P or A; a CDR-L2 sequence of X₁TX₂X₃X₄X₅X₆; where X₁ is G or A; X₂ is K, D, or N; X₃ is F, M or K; X₄ is L or R; X₅ is A, P, or V; and X₆ is P or S; and a CDR-L3 sequence of X₁LWYSNX₂VW, where X₁ is V, A, or T; and X₂ is R or L; and iii) wherein one or more of CDR sequences of the VH region of i) and/or of the VL region of ii) comprise one amino acid substitution or a combination thereof selected from X₂4V and X₂4F in CDR-H1; D15, and X₁16A in CDR-H2; H1, X₁2E, F4, and N6 in CDR-H3; and X₁1L and W3 in CDR-L3. The invention also relates to a polynucleotide encoding the polypeptide or polypeptide construct of the invention, a vector comprising said polynucleotide and a host cell transformed or transfected with said polynucleotide or with said vector. Moreover, the invention also provides for a process for the production of said polypeptide or polypeptide construct and a pharmaceutical composition comprising said polypeptide or polypeptide construct of the invention. Furthermore, the invention relates to medical uses of said polypeptide or polypeptide construct and kits comprising said polypeptide or polypeptide construct.

[0001] The invention relates to a polypeptide or polypeptide construct comprising: a binding domain binding to an extracellular epitope of the human CD3ε chain comprising or consisting of a VH region and a VL region, wherein i) the VH region comprises: a CDR-H1 sequence of X₁YAX₂N, where X, is K, V, S, G, R, T, or I; and X₂ is M or I; a CDR-H2 sequence of RIRSKYNNYATYYADX₁VKX₂, where X, is S or Q; and X₂ is D, G, K, S, or E; and a CDR-H3 sequence of HX₁NFGNSYX₂SX₃X₄AY, where X, is G, R, or A; X₂ is I, L, V, or T; X₃ is Y, W or F; and X₄ is W, F or Y; and ii) wherein the VL region comprises: a CDR-L1 sequence of X₁SSTGAVTX₂X₃X₄YX₅N, where X, is G, R, or A; X₂ is S or T; X₃ is G or S; X₄ is N or Y; and X₅ is P or A; a CDR-L2 sequence of X₁TX₂X₃X₄X₅X₆; where X, is G or A; X₂ is K, D, or N; X₃ is F, M or K; X₄ is L or R; X₅ is A, P, or V; and X₆ is P or S; and a CDR-L3 sequence of X₁LWYSNX₂WV, where X, is V, A, or T; and X₂ is R or L; and iii) wherein one or more of CDR sequences of the VH region of i) and/or of the VL region of ii) comprise one amino acid substitution or a combination thereof selected from X₂4V and X₂4F in CDR-H1; D15, and X₁16A in CDR-H2; H1, X₁2E, F4, and N6 in CDR-H3; and X₁1L and W3 in CDR-L3. The invention also relates to a polynucleotide encoding the polypeptide or polypeptide construct of the invention, a vector comprising said polynucleotide and a host cell transformed or transfected with said polynucleotide or with said vector. Moreover, the invention also provides for a process for the production of said polypeptide or polypeptide construct and a pharmaceutical composition comprising said polypeptide or polypeptide construct of the invention. Furthermore, the invention relates to medical uses of said polypeptide or polypeptide construct and kits comprising said polypeptide or polypeptide construct.

[0002] T cell engagers (TCEs) make use of T cells' ability to recognize foreign peptides on mutated or infected cells through T cell receptors. T cell recognition is mediated by clonotypically distributed alpha beta and gamma delta T cell receptors (TcR) that interact with the peptide-loaded molecules of the peptide MHC (pMHC) at low affinities. The antigen-specific chains of the TcR do not possess signalling domains but instead are coupled to the conserved multisubunit signaling apparatus CD3. The mechanism by which TcR ligation is directly communicated to the signalling apparatus is a fundamental topic of interest in T cell biology. In brief, CD3 subunits that translate cell surface antigen binding into an intracellular phosphorylation signaling cascade. These phosphorylation events culminate in the activation of transcription factors such as NFAT and NFkB that lead to increased expression of cytokines and effector proteins such as granzymes and perforin. It is this characteristic that is used by TCEs which bind simultaneously a target antigen on a tumor cell and CD3 on T cells to form an artificial immune synapse eventually leading to the destruction of the cell expressing said target antigen.

[0003] From a clinical perspective, TCEs do not only have to show efficient cell killing activity, but at the same time other characteristics like, e.g., a manageable side effect profile are desired. However, these aspects are not the only considerations when it comes to the development of TCEs. Other areas of importance for drug development are pre-patient, i.e. concern characteristics of the TCE outside of the patient's body such as, e.g., shelf life, production scalability, solubility, stability, and ease of formulation. In other terms, an important feature from a pharmaceutical perspective is the developability of a given TCE or parts thereof to address certain needs such as for example in drug production or administration. Bringing together the requirements from clinical and pharmacological perspective is important for TCE platform advancement in relation to commercialization. In view of the biological complexities of having the TCE inducing the formation of the immune synapse, it can be challenging to manipulate the TCE in terms of its other characteristics such as for example shelf life, production scalability, solubility, stability, and ease of formulation while maintaining its effectiveness in mediating the killing of target cells.

[0004] Thermal stability of TCEs is an important feature within and outside of the patient's body. A higher thermal stability of TCEs reduces the formation of high molecular weight aggregates caused which in turn provides, e. g., for a TCE that is active for a prolonged time in the body but will also be more stable during storage. Moreover, the reduction of high molecular weight aggregates can also result in a more favourable immunogenetic profile of the TCE upon administration thereby reducing the risk of side effects.

[0005] Classically, the VH and VL domains making up the anti-target and anti-CD3 binding domains of TCEs are an area that has been the focus of improving stability. This is in particular true for Fvs that are part of TCEs. The hydrophobic interaction between the VH and the VL is believed to strongly determine the stability of a Fv. The interaction can in many Fvs not be strong enough to be stable for in vitro and/or in vivo applications. This has led to the coupling of the V-domains of an Fv by a linker resulting in single chain Fvs (scFvs). While the linker has shown to be effective in holding the V-domains (variable domains) together, it may not always be effective to keep a scFv active at all or active enough for a given application making it necessary to further improve stability. One approach to increase stability is that by increasing the interaction of the two V-domains, the stability of a biologically active Fv can be increased so that it remains a target binding monomer. Although approaches have been described in the art to improve stability of scFv, there is still a need in the art for improving stability of Fvs that are part of TCEs.

[0006] The invention relates to a polypeptide or polypeptide construct comprising: a binding domain binding to an extracellular epitope of the human CD3ε chain comprising or consisting of a VH region and a VL region, wherein
[0007] i) the VH region comprises:
   [0008] a CDR-H1 sequence of X₁YAX₂N, where X, is K, V, S, G, R, T, or I; and X₂ is M or I;
   [0009] a CDR-H2 sequence of RIRSKYNNYATYYADX₁VKX₂, where X, is S or Q; and X₂ is D, G, K, S, or E; and
   [0010] a CDR-H3 sequence of HX₁NFGNSYX₂SX₃X₄AY, where X, is G, R, or A; X₂ is I, L, V, or T; X₃ is Y, W or F; and X₄ is W, F or Y; and
[0011] ii) wherein the VL region comprises:
   [0012] a CDR-L1 sequence of X₁SSTGAVTX₂X₃X₄YX₅N, where X, is G, R, or A; X₂ is S or T; X₃ is G or S; X₄ is N or Y; and X₅ is P or A;
   [0013] a CDR-L2 sequence of X₁TX₂X₃X₄X₅X₆; where X, is G or A; X₂ is K, D, or N; X₃ is F, M or K; X₄ is L or R; X₅ is A, P, or V; and X₆ is P or S; and
   [0014] a CDR-L3 sequence of X₁LWYSNX₂WV, where X, is V, A, or T; and X₂ is R or L; and
[0015] iii) wherein one or more CDR sequences of the VH region of i) and/or of the VL region of ii) comprise one or more amino acid substitutions selected from X₂4V and X₂4F in CDR-H1;
   [0016] D15 (preferably E), and X₁16A in CDR-H2;
   [0017] H1 (preferably A or N), X₁2E, F4 (preferably I), and N6 (preferably S or T) in CDR-H3; and
   [0018] X₁1L and W3 (preferably Y) in CDR-L3.

[0019] The term “polypeptide construct” (alternatively referred to also as “compound” herein) refers to an antigen-binding (or epitope-binding) molecule comprising domains themselves comprising paratopes. In the context of the present invention, a polypeptide construct is understood as an organic polymer which comprises at least one continuous, unbranched amino acid chain that naturally is not existing, but was engineered. An example of a polypeptide construct that is a single polypeptide is a BiTE® molecule that comprises a core structure comprising at least one functional target binding domain together with at least one complete functional CD3 binding domain on a single polypeptide chain, wherein these domains are linked directly by flexible peptide (a “linker”) without any further inserted domain unlike, for example, Xmabs that comprise the target binder and the CD3 binder on different polypeptide chains. In the context of the present invention, such a polypeptide construct comprising more than one amino acid chain is likewise envisaged. It is preferred that the term “polypeptide” is used in connection with single chain forms of the compounds of the present invention, whereas “polypeptide construct” may preferably be more adequate to describe also polypeptides that comprise more than one polypeptide chain, for example two, three or four polypeptide chains. Additionally, the term “polypeptide construct” is also suitable to describe compounds of the invention that comprise one or more non-amino acid-based constituents, e.g. human serum albumin, etc. (HSA). An amino acid chain of a polypeptide typically comprises at least 50 amino acids, preferably at least 100, 200, 300, 400 or 500 amino acids. It is also envisaged in the context of the present invention that an amino acid chain of a polymer is linked to an entity which is not composed of amino acids.

[0020] The polypeptides comprise structural and/or functional features based on the structure and/or function of an antibody, e.g., of a full-length immunoglobulin molecule. A polypeptide construct, hence, specifically and, preferably, selectively or immunospecifically binds to its target or antigen, more precisely to an epitope of said target or target antigen, and/or it comprises the heavy chain variable region (VH) and/or the light chain variable region (VL) naturally found in an antibody, or comprises domains derived therefrom. Accordingly, the constructs may alternatively be regarded as comprising paratope-structured and epitope-binding structures, such as those found in natural antibodies or fragments thereof. A polypeptide construct according to the invention comprises the minimum structural requirements of an antibody which allow for immunospecific target binding, i.e., a paratope that recognizes immunospecifically or immunoselectively an epitope on a target antigen unless specified differently. This minimum requirement may e.g. be defined by the presence of at least three light chain CDRs (i.e. CDR1, CDR2 and CDR3 of the VL region, also termed CDR-L1, CDRL2, and CDR-L3) and/or three heavy chain CDRs (i.e. CDR1, CDR2 and CDR3 of the VH region, also termed CDR-H1, CDR-H2 and CDR-H3), preferably of all six CDRs. A polypeptide construct may hence be characterized by the presence of three or six CDRs in a binding domain, and the skilled person knows where (in which order) those CDRs are located within the paratopic binding structures. In in the context of the CD3 binding domain of the polypeptide or polypeptide construct, said paratopic binding structure is specified to be a binding domain characterized by the presence of a VH and VL region comprising CDRs. Hence, a polypeptide/polypeptide construct according to the invention comprises at least a paratopic binding structure being a binding domain binding selectively, immunospecifically and/or immunoselectively to an extracellular epitope of the human CD3ε (also termed CD3epsilon or “CD3 epsilon” herein) chain comprising VH and VL regions with CDRs. Accordingly, a polypeptide/polypeptide construct according to the invention comprises a paratope selectively, immunospecifically and/or immunoselectively binding to an epitope of human CD3 epsilon. The terms “CDR”, and its plural “CDRs”, refer to the complementarity determining region of which three make up the binding character of a light chain variable region (CDR-L1, CDR-L2 and CDR-L3) and three make up the binding character of a heavy chain variable region (CDR-H1, CDR-H2 and CDR-H3). CDRs contain most of the residues responsible for specific interactions of antibodies (or constructs or binding domain) with an antigen and hence contribute to the functional activity of an antibody molecule: they are the main determinants of antigen specificity. The exact definition of CDR boundaries and lengths is subject to different classification and numbering systems. CDRs may therefore be referred to by Kabat, Chothia, contact or any other boundary definitions, including the numbering system described herein. Despite differing boundaries, each of these systems has some degree of overlap in what constitutes the so called “hypervariable regions” within the variable sequences. CDR definitions according to these systems may therefore differ in length and boundary areas with respect to the adjacent framework region. See for example Kabat (an approach based on cross-species sequence variability), Chothia (an approach based on crystallographic studies of antigen-antibody complexes), and/or MacCallum (Kabat et al., loc. cit.; Chothia et al., J. Mol. Biol, 1987, 196: 901-917; and MacCallum et al., J. Mol. Biol, 1996, 262: 732). Still another standard for characterizing the antigen binding site is the AbM definition used by Oxford Molecular's AbM antibody modeling software. See, e.g., Protein Sequence and Structure Analysis of Antibody Variable Domains. In: Antibody Engineering Lab Manual (Ed.: Duebel, S. and Kontermann, R., Springer-Verlag, Heidelberg). To the extent that two residue identification techniques define regions of overlapping, but not identical regions, they can be combined to define a hybrid CDR. However, the numbering in accordance with the so-called Kabat system is preferred The term “antigen-binding structure”, as used herein, refers to any polypeptide/polypeptide construct that comprises an antigen-binding structure or any molecule that has binding activity to a specified antigen. Said antigen-binding structures or molecules are not limited to those derived from a living organism, and for example, they may be a polypeptide produced from an artificially designed sequence. They may also be any of a naturally occurring polypeptide, synthetic polypeptide, recombinant polypeptide, and such. As the antigen-binding structure in accordance with the present invention bind specifically to parts of an antigen, i.e., they bind specifically to an epitope of CD3epsilon, the antigen (epitope)-binding structure may also be broadly defined as “paratopic structure” herein. Accordingly, the polypeptides/polypeptide constructs according to the invention may also be defined as a domain comprising a paratope that are preferably immunospecifically or immunoselectively binding to a target antigen/target epitope; and in certain embodiments comprising at least a further paratope, preferably immunospecifically or immunoselectively, binding to a further, different or same, target antigen/target epitope. Therefore, whenever the present description refers to a domain of a construct or molecule of the present invention, the construct comprises at least one paratopic structure (or paratope) binding human CD3epsilon as specified herein, particularly according to any one of the appended claims. In certain embodiments, said construct comprises at least a further paratope binding also to human CD3epsilon or a different target antigen as defined herein.

[0021] The term “antibody” as used in accordance with the invention comprises full-length antibodies, also including camelid antibodies and other immunoglobulins generated by biotechnological or protein engineering methods or processes. These full-length antibodies may be for example monoclonal, recombinant, chimeric, deimmunized, humanized and human antibodies, as well as antibodies from other species such as mouse, hamster, rabbit, rat, goat, or non-human primates.

[0022] “Polypeptides/polypeptide constructs” of the present invention may also comprise the structure of a full-length immunoglobulin as it occurs naturally. For example, they may comprise (at least) two full-length antibody heavy chains and two full-length antibody light chains. However, given that the polypeptides/polypeptide constructs according to the invention preferably comprise a linker linking the VH and VL region of the CD3 binding domain, preferably resulting in a scFv, and/or, in other embodiments, comprise at least one further binding domain comprising a paratope, they do not occur naturally, and they are markedly different in their function from naturally occurring products. A polypeptide or polypeptide construct of the invention is hence an artificial “hybrid” molecule comprising, preferably, an scFv and/or, in some embodiments, distinct paratopes/binding domains with different specificities and/or selectivities.

[0023] As indicated above, the polypeptides of the invention may comprise more than one polypeptide chain, i.e. polypeptides comprising two or more polypeptide chains are also subject to the present invention, particularly polypeptides forming a three-dimensional protein-like structure that allows for the immunospecific binding to CD3epsilon. Therefore, the definition of the term “polypeptide construct” includes molecules consisting of only one polypeptide chain as well as molecules consisting of two, three, four or more polypeptide chains, which chains can be either identical (homodimers, homotrimers or homo oligomers) or different (heterodimer, heterotrimer or heterooligomer). Examples for the above identified antibodies and their fragments, variants, derivatives and constructs derived therefrom are described inter alia in Harlow and Lane, Antibodies: A laboratory manual, CSHL Press (1988); Kontermann and Dübel, Antibody Engineering, Springer, 2nd ed. 2010; and Little, Recombinant Antibodies for Immunotherapy, Cambridge University Press 2009.

[0024] “Polypeptides/polypeptide constructs” of the present invention may also comprise fragments of full-length antibodies, such as VH, VHH, VL, (s)dAb, Fv, light chain (VL-CL), Fd (VH-CH1), heavy chain, Fab, Fab′, F(ab′)2 or “rIgG” (“half antibody” consisting of a heavy chain and a light chain), whereas not all of the foregoing fragments are applicable for the CD3epsilon binding domain since it is defined to comprise a VH and a VL region, but to the embodiments regarding the at least one further binding domain. Polypeptides/polypeptide constructs according to the invention may also comprise modified fragments of antibodies, also called antibody variants or antibody derivatives. Examples include, but are not limited to, scFv, di-scFv or bi(s)-scFv, scFv-Fc, scFv-zipper, scFab, Fab2, Fab3, diabodies, single chain diabodies, tandem diabodies (Tandab's), tandem di-scFv, tandem tri-scFv “minibodies” exemplified by a structure which is as follows: (VH-VL-CH3)2, (scFv-CH3)2, ((scFv)2-CH3+CH3), ((scFv)2-CH3) or (scFv-CH3-scFv)2, multibodies such as triabodies or tetrabodies, and single domain antibodies such as nanobodies or single variable domain antibodies comprising merely one variable region, which might be VHH, VH or VL, that selectively and, preferably, specifically binds to an antigen or target independently of other variable regions or domains, whereas not all of the foregoing fragments are applicable for the CD3epsilon binding domain since it is defined to comprise a VH and a VL region, but to the embodiments regarding the at least one further binding domain. Further possible formats of the polypeptides/polypeptide constructs according to the invention are cross bodies, maxi bodies, hetero Fc constructs, mono Fc constructs and scFc constructs. Examples for those formats will be described herein below.

[0025] Furthermore, the definition of the term “polypeptide construct” includes bivalent and polyvalent/multivalent polypeptides/polypeptide constructs as well as bispecific and polyspecific/multispecific polypeptides/polypeptide constructs, which selectively and, preferably, specifically bind to two, three or more antigenic structures (epitopes), through distinct binding domains. A polypeptide construct can have more binding valences than specificities, e.g. in a case where it has two binding domains for one target (CD3epsilon) and one binding domain for another target, for example those described herein below, or vice versa, in which case the polypeptide construct is trivalent and bispecific. In general, the term “bispecific” includes the meaning that a polypeptide construct binds to at least two different antigens, such as said CD3epsilon and a further target, for example those specified herein below.

[0026] The terms “paratope”, “antigen-binding domain”, “epitope-binding domain”, “binding domain” or “domain which binds to . . . ” characterize, in connection with the present invention, a domain of the construct which selectively and, preferably, specifically or immunospecifically binds to/interacts with/recognizes an epitope on the target or antigen (here: CD3). The terms “binding domain” or “domain which binds to . . . ” or “domain” as far as it relates to the herein described “constructs” characterizes in connection with the present invention a domain of the construct which immunospecifically binds to/interacts with/recognizes an epitope on the target or antigen. The structure and function of the CD3epsilon binding domain (also termed as first binding domain in the case of a polypeptide/polypeptide construct comprising a further, consequently second, third, and so on, binding domain), and preferably also the structure and/or function of any further binding domain (binding to for example to a cell surface antigen such as a tumor antigen), is/are based on the structure and/or function of an antibody, e.g. of a full-length immunoglobulin polypeptide. The “binding domain” or “domain which binds to . . . ” may hence comprise the minimum structural requirements of an antibody which allow for immunospecific target binding. While the structural requirements of the CD3epsilon binding domain is specified to comprise a VH and VL region with corresponding three CDRs per region, said minimum structural requirement in any further binding domain may e.g. be defined by the presence of at least three light chain CDRs (i.e. CDR1, CDR2 and CDR3 of the VL region) and/or of three heavy chain CDRs (i.e. CDR1, CDR2 and CDR3 of the VH region), preferably of all six CDRs. A “domain which binds to” (or a “binding domain”) may typically comprise an antibody light chain variable region (VL) and an antibody heavy chain variable region (VH); however, it does not have to comprise both, but may comprise only one of VH or VL. Fd fragments, for example, often retain some antigen-binding function of the intact antigen-binding domain. The terms “paratope”, “antigen-binding structure” and “epitope-binding structure, as used herein, refer also to a portion of an antibody (or a molecule according to the invention), which comprises a region that specifically binds and is complementary to the whole or a portion of an antigen or a part thereof, i.e. an antibody can only bind to a particular portion of the antigen. The particular portion is called “epitope”. An antigen-binding domain can be provided from one or more antibody variable domains. Preferably, the antigen-binding domains contain antibody variable region that comprising both the antibody light chain variable region (VL) and antibody heavy chain variable region (VH). Such preferable antigen-binding domains include, for example, “single-chain Fv (scFv)”, “single-chain antibody”, “Fv”, “single-chain Fv2 (scFv2)”, “Fab”, and “F (ab”)2 “. For the CD3epsilon binding domain it is preferred that it takes the form of an scFv.

[0027] Examples for the format of a “domain which binds to”, “domain comprising a paratope” (or “binding domain”, “antigen-binding structure”, “epitope-binding structure”) include unless otherwise defined, but are not limited to, full-length antibodies, fragments of full-length antibodies (such as VH, VHH, VL), (s)dAb, Fv, light chain (VL-CL), Fd (VH-CH1), heavy chain, Fab, Fab′, F(ab′)2 or “r IgG” (“half antibody”)), antibody variants or derivatives such as scFv, di-scFv or bi(s)-scFv, scFv-Fc, scFv-zipper, scFab, Fab2, Fab3, diabodies, single chain diabodies, tandem diabodies (Tandab's), tandem di-scFv, tandem tri-scFv, “minibodies” (selected from formats such as (VH-VL-CH3)2, (scFv-CH3)2, ((scFv)2-CH3+CH3)), ((scFv)2-CH3) or (scFv-CH3-scFv)2, multibodies such as triabodies or tetrabodies, and single domain antibodies such as nanobodies or single variable domain antibodies comprising merely one variable region, which might be VHH, VH or VL. Further examples for the format of a “domain which binds to” (or a “binding domain”) include (1) an antibody fragment or variant comprising VL, VH, CL and CH1 (such as Fab); (2) an antibody fragment or variant comprising two linked Fab fragments (such as a F(ab′)2); (3) an antibody fragment or variant comprising VH and CH1 (such as Fd); (4) an antibody fragment or variant comprising VL and CL (such as the light chain); (5) an antibody fragment or variant comprising VL and VH (such as Fv); (5) a dAb fragment (Ward et al., (1989) Nature 341:544-546), which has a VH domain; (6) an antibody variant comprising at least three isolated CDRs of the heavy and/or the light chain; and (7) a single chain Fv (scFv). Examples for embodiments of constructs or binding domains according to the invention are e.g. described in WO 00/006605, WO 2005/040220, WO 2008/119567, WO 2010/037838, WO 2013/026837, WO 2013/026833, US 2014/0308285, US 2014/0302037, W O2014/144722, WO 2014/151910, and WO 2015/048272. In the context of the present invention, a paratope is understood as an antigen-binding site which is a part of a polypeptide as described herein and which recognizes and binds to an antigen. A paratope is typically a small region of about at least 5 amino acids. A paratope as understood herein typically comprises parts of antibody-derived heavy (VH) and light chain (VL) sequences. Each binding domain of a polypeptide according to the present invention is provided with a paratope comprising a set of 6 complementarity-determining regions (CDR loops) with three of each being comprised within the antibody-derived VH and VL sequence, respectively.

[0028] It is envisaged for the compounds, particularly for the constructs of the present invention that a) the construct is a single chain polypeptide or a single chain construct, b) the CD3epsilon binding domain is in the format of an scFv, c) any further, such as a second binding and/or third domain is in the format of an scFv, d) the first and said further, such as said second and/or third domain are connected via a linker, preferably a peptide linker, more preferably a glycine/serine or glycine/glutamine linker, and/or e) the construct comprises a domain providing an extended serum half-life, such as an Fc-based domain, or human serum albumin (HSA). In the latter case, it is a preferred embodiment, wherein the term “polypeptide construct” makes clear that it comprises more than a single peptide chain. A preferred Fc-based domain which extends the serum half-life (also termed “HLE” domain) comprises two polypeptide monomers, each comprising a hinge, a CH2 domain and a CH3 domain, wherein said two polypeptide monomers are fused to each other via a peptide linker (see, e.g., SEQ ID NO: 18 and 19); the format is in N-terminal to C-terminal order: hinge-CH2-CH3-linker-hinge-CH2-CH3.

[0029] The constructs of the present invention are preferably “in vitro generated constructs” and/or “recombinant constructs”. In the context of the present invention, the term “in vitro generated” refers to a construct according to the above definition where all or part of the binding domain or of a variable region (e.g., at least one CDR) is generated in a non-immune cell selection, e.g., in an in vitro phage display, on a protein chip or in any other method in which candidate amino acid sequences can be tested for their ability to bind to an antigen. This term thus preferably excludes sequences generated solely by genomic rearrangement in an immune cell in an animal. It is envisaged that the first and/or second domain of the construct is produced by or obtainable by phage display or library screening methods rather than by grafting CDR sequences from a pre-existing (monoclonal) antibody into a scaffold. A “recombinant construct” is a construct generated or produced using (inter alia) recombinant DNA technology or genetic engineering.

[0030] The constructs of the present invention are envisaged to be monoclonal. As used herein, polypeptides or constructs that are denominated “monoclonal” (mAb) are obtained from a population of substantially homogeneous antibodies/constructs, i.e., the individual antibodies/constructs comprised in the population are identical (in particular with respect to their amino acid sequence) except for possible naturally occurring mutations and/or post-translational modifications (e.g., isomerizations, amidations) that may be present in minor amounts. Monoclonal antibodies/constructs are highly specific, being directed against a single epitope within the antigen, in contrast to polyclonal antibody preparations which typically include different antibodies directed against different determinants (or epitopes). In addition to their specificity, monoclonal antibodies are advantageous in that they are synthesized by the hybridoma culture, hence uncontaminated by other immunoglobulins. The modifier “monoclonal” indicates the character of the antibody/construct as being obtained from a substantially homogeneous population of antibodies and is not to be construed as requiring production of the antibody by any specific method.

[0031] For the preparation of monoclonal antibodies, any technique providing antibodies produced by continuous cell line cultures can be used. For example, monoclonal antibodies to be used may be made by the hybridoma method first described by Koehler et al., Nature, 256: 495 (1975), or may be made by recombinant DNA methods (see, e.g., U.S. Pat. No. 4,816,567). Examples for further techniques to produce human monoclonal antibodies include the trioma technique, the human B-cell hybridoma technique (Kozbor, Immunology Today 4 (1983), 72) and the EBV-hybridoma technique (Cole et al., Monoclonal Antibodies and Cancer Therapy, Alan R. Liss, Inc. (1985), 77-96).

[0032] Hybridomas can then be screened using standard methods, such as enzyme-linked immunosorbent assay (ELISA) and surface plasmon resonance (BIACORE™) analysis, to identify one or more hybridomas that produce an antibody that selectively and, preferably, specifically or immunospecifically binds to a specified antigen. Any form of the relevant antigen may be used as the immunogen, e.g., recombinant antigen, naturally occurring forms, any variants or fragments thereof, as well as an antigenic peptide thereof. Surface plasmon resonance as employed in the BIAcore™ system can be used to increase the efficiency of phage antibodies/constructs which bind to an epitope of a target antigen (Schier, Human Antibodies Hybridomas 7 (1996), 97-105; Malmborg, J. Immunol. Methods 183 (1995), 7-13).

[0033] Another exemplary method of making constructs or binding domains includes screening protein expression libraries, e.g., phage display or ribosome display libraries. Phage display is described, for example, in Ladner et al., U.S. Pat. No. 5,223,409; Smith (1985) Science 228:1315-1317, Clackson et al., Nature, 352: 624-628 (1991) and Marks et al., J. Mol. Biol., 222: 581-597 (1991).

[0034] In addition to the use of display libraries, the relevant antigen can be used to immunize a non-human animal, e.g., a rodent (such as a mouse, hamster, rabbit or rat). In one embodiment, the non-human animal includes at least a part of a human immunoglobulin gene. For example, it is possible to engineer mouse strains deficient in mouse antibody production with large fragments of the human Ig (immunoglobulin) loci. Using the hybridoma technology, antigen-specific monoclonal antibodies derived from the genes with the desired specificity may be produced and selected. See, e.g., Xenomouse™ mouse, Green et al. (1994) Nature Genetics 7:13-21, US 2003-0070185, WO 96/34096, and WO 96/33735.

[0035] A monoclonal antibody can also be obtained from a non-human animal, and then modified, e.g., humanized, deimmunized, rendered chimeric etc., using recombinant DNA techniques known in the art. Examples of modified constructs or binding domains include humanized variants of non-human antibodies/constructs, “affinity matured” constructs or binding domains (see, e.g. Hawkins et al. J. Mol. Biol. 254, 889-896 (1992) and Lowman et al., Biochemistry 30, 10832-10837 (1991)) and antibody variants or mutants with altered effector function(s) (see, e.g., U.S. Pat. No. 5,648,260, Kontermann and Dubel (2010), loc. cit. and Little (2009), loc. cit.).

[0036] In immunology, affinity maturation is the process by which B cells produce antibodies with increased affinity for antigen during the course of an immune response. With repeated exposures to the same antigen, a host will produce antibodies of successively greater affinities. Like the natural prototype, the in vitro affinity maturation is based on the principles of mutation and selection. The in vitro affinity maturation has successfully been used to optimize antibodies, antibody fragments, antibody variants, constructs or binding domains. Random mutations inside the CDRs are introduced using radiation, chemical mutagens or error-prone PCR. In addition, the genetic diversity can be increased by chain shuffling. Two or three rounds of mutation and selection using display methods like phage display usually results in antibodies, antibody fragments, antibody variants, constructs or binding domains with affinities in the low nanomolar range.

[0037] A preferred type of an amino acid substitutional variation of the constructs or binding domains of the invention involves substituting one or more residues within the hypervariable region of a parent antibody structure (e.g. a humanized or human antibody structure). Generally, the resulting variant(s) selected for further development will have improved biological properties relative to the parent antibody structure from which they are generated. A convenient way for generating such substitutional variants involves affinity maturation using phage display. Briefly, several sites of the hypervariable region (e. g. 6-7 sites) are mutated to generate all possible amino acid substitutions at each site. The variants thus generated are displayed in a monovalent fashion from filamentous phage particles as fusions to the gene Ill product of M13 packaged within each particle. The phage-displayed variants are then screened for their biological activity (e.g. binding affinity) as disclosed herein. To identify candidate hypervariable region sites contributing significantly to antigen binding (candidates for modification), alanine scanning mutagenesis can also be performed. Alternatively, or additionally, it may be beneficial to analyze a crystal structure of the complex between the antigen and the construct or the binding domain to identify contact points between the binding domain and its specific antigen. Such contact residues and neighbouring residues are candidates for substitution according to the techniques elaborated herein. Once such variants are generated, the panel of variants is subjected to screening as described herein and antibodies, their antigen-binding fragments, constructs or binding domains with superior properties in one or more relevant assays may be selected for further development.

[0038] The constructs and binding domains of the present invention specifically include “chimeric” versions in which a portion of the heavy and/or light chain is identical with or homologous to corresponding sequences in antibodies derived from a particular species or belonging to a particular antibody class or subclass, while the remainder of the chain(s) is/are identical with or homologous to corresponding sequences in antibodies derived from another species or belonging to another antibody class or subclass, as well as fragments or variants of such antibodies, so long as they exhibit the desired biological activity (U.S. Pat. No. 4,816,567; Morrison et al., Proc. Natl. Acad. Sci. USA, 81: 6851-6855 (1984)). Chimeric constructs or binding domains of interest herein include “primitized” constructs comprising variable domain antigen-binding sequences derived from a non-human primate (e.g., Old World Monkey, Ape etc.) and human constant region sequences. A variety of approaches for making chimeric antibodies or constructs have been described. See e.g., Morrison et al., Proc. Natl. Acad. ScL U.S.A. 81:6851, 1985; Takeda et al., Nature 314:452, 1985, Cabilly et al., U.S. Pat. No. 4,816,567; Boss et al., U.S. Pat. No. 4,816,397; Tanaguchi et al., EP 0171496; EP 0173494; and GB 2177096.

[0039] An antibody, polypeptide construct, antibody fragment, antibody variant or binding domain may also be modified by specific deletion of human T cell epitopes (a method called “deimmunization”) using methods disclosed for example in WO 98/52976 or WO 00/34317. Briefly, the heavy and light chain variable regions of an antibody, construct or binding domain can be analyzed for peptides that bind to MHC class II; these peptides represent potential T cell epitopes (as defined e.g. in WO 98/52976 and WO 00/34317). For detection of potential T cell epitopes, a computer modeling approach termed “peptide threading” can be applied, and in addition a database of human MHC class II binding peptides can be searched for motifs present in the VH and VL sequences, as described in WO 98/52976 and WO 00/34317. These motifs bind to any of the 18 major MHC class II DR allotypes, and thus constitute potential T cell epitopes. Potential T cell epitopes detected can be eliminated by substituting small numbers of amino acid residues in the variable domains or variable regions, or preferably, by single amino acid substitutions. Typically, conservative substitutions are made. Often, but not exclusively, an amino acid common to a position in human germline antibody sequences may be used. Human germline sequences are disclosed e.g. in Tomlinson, et al. (1992) J. Mol. Biol. 227:776-798; Cook, G. P. et al. (1995) Immunol. Today Vol. 16 (5): 237-242; and Tomlinson et al. (1995) EMBO J. 14: 14:4628-4638. The V BASE directory (www2.mrc-Imb.cam.ac.uk/vbase/list2.php) provides a comprehensive directory of human immunoglobulin variable region sequences (compiled by Tomlinson, L A. et al. MRC Centre for Protein Engineering, Cambridge, UK). These sequences can be used as a source of human sequence, e.g., for framework regions and CDRs. Consensus human framework regions can also be used, for example as described in U.S. Pat. No. 6,300,064.

[0040] “Humanized” antibodies, variants or fragments thereof, constructs and binding domains are based on immunoglobulins of mostly human sequences, which contain (a) minimal sequence(s) derived from non-human immunoglobulin. For the most part, humanized antibodies, variants or fragments thereof, constructs and binding domains are based on human immunoglobulins (recipient antibodies) in which residues from a hypervariable region or CDR are replaced by residues from a hypervariable region or CDR of a non-human species (donor antibody) such as a rodent (e.g. mouse, hamster, rat or rabbit) having the desired specificity, affinity, capacity and/or biological activity. In some instances, Fv framework region (FR) residues of the human immunoglobulin are replaced by corresponding non-human residues. Furthermore, “humanized” antibodies, variants or fragments thereof, constructs and binding domains as used herein may also comprise residues which are found neither in the recipient antibody nor the donor antibody. These modifications are made to further refine and optimize antibody performance. The humanized antibodies, variants or fragments thereof, constructs and binding domains may also comprise at least a portion of an immunoglobulin constant region (such as Fc), typically that of a human immunoglobulin. For further details, see Jones et al., Nature, 321: 522-525 (1986); Reichmann et al., Nature, 332: 323-329 (1988); and Presta, Curr. Op. Struct. Biol., 2: 593-596 (1992).

[0041] Humanized antibodies, variants or fragments thereof, constructs and binding domains can be generated by replacing sequences of the (Fv) variable region that are not directly involved in antigen binding with equivalent sequences from human (Fv) variable regions. Exemplary methods for generating such molecules are provided by Morrison (1985) Science 229:1202-1207; by Oi et al. (1986) BioTechniques 4:214; and by U.S. Pat. Nos. 5,585,089; 5,693,761; 5,693,762; 5,859,205; and 6,407,213. These methods include isolating, manipulating, and expressing the nucleic acid sequences that encode all or part of immunoglobulin (Fv) variable regions from at least one of a heavy or light chain. Such nucleic acids may be obtained from a hybridoma producing an antibody against a predetermined target, as described above, as well as from other sources. The recombinant DNA encoding the humanized antibody, variant or fragment thereof, construct or binding domain can then be cloned into an appropriate expression vector.

[0042] Humanized antibodies, variants or fragments thereof, constructs and binding domains may also be produced using transgenic animals such as mice that express human heavy and light chain genes but are incapable of expressing the endogenous mouse immunoglobulin heavy and light chain genes. Winter describes an exemplary CDR grafting method that may be used to prepare the humanized molecules described herein (U.S. Pat. No. 5,225,539). All the CDRs of a given human sequence may be replaced with at least a portion of a non-human CDR, or only some of the CDRs may be replaced with non-human CDRs. It is only necessary to replace the number of CDRs required for binding of the humanized molecule to a predetermined antigen.

[0043] A humanized antibody, variant or fragment thereof, construct or binding domain can be optimized by the introduction of conservative substitutions, consensus sequence substitutions, germline substitutions and/or back mutations. Such altered immunoglobulin molecules can be made by any of several techniques known in the art, (e.g., Teng et al., Proc. Natl. Acad. Sci. U.S.A., 80: 7308-7312, 1983; Kozbor et al., Immunology Today, 4: 7279, 1983; Olsson et al., Meth. Enzymol., 92: 3-16, 1982, and EP 239 400).

[0044] Human anti-mouse antibody (HAMA) responses have led the industry to prepare chimeric or otherwise humanized antibodies/constructs. It is however expected that certain human anti-chimeric antibody (HACA) responses will be observed, particularly in chronic or multi-dose utilizations of an antibody or construct. Thus, it would be desirable to provide constructs comprising a human binding domain against a target, to vitiate concerns and/or effects of HAMA or HACA response.

[0045] Therefore, according to one embodiment, the polypeptide construct having at least one further binding domain, said binding domain(s) are “human”. The term “human antibody”, “human construct” and “human binding domain” includes antibodies, constructs and binding domains, respectively, having antibody-derived regions such as variable and constant regions or domains which correspond substantially to human germline immunoglobulin sequences known in the art, including, for example, those described by Kabat et al. (1991) (loc. cit.). The human constructs or binding domains of the invention may include amino acid residues not encoded by human germline immunoglobulin sequences (e.g., mutations introduced by random or site-specific mutagenesis in vitro or by somatic mutation in vivo), for example in the CDRs, and particularly in CDR3. The human constructs or binding domains can have at least one, two, three, four, five, or more positions replaced with an amino acid residue that is not encoded by the human germline immunoglobulin sequence. The definition of human antibodies, constructs and binding domains as used herein also contemplates fully human antibodies, constructs and binding domains which include only non-artificially and/or genetically altered human sequences of antibodies as those can be derived by using technologies or systems such as the XenomouseT mouse.

[0046] Polypeptides/polypeptide constructs comprising at least one human binding domain may avoid some of the problems associated with antibodies or constructs that possess non-human such as rodent (e.g. murine, rat, hamster or rabbit) variable and/or constant regions. The presence of such rodent derived proteins can lead to the rapid clearance of the antibodies or constructs or can lead to the generation of an immune response against the antibody or construct by a patient. To avoid the use of rodent-derived constructs, humanized or fully human constructs can be generated through the introduction of human antibody function into a rodent so that the rodent produces fully human antibodies.

[0047] The ability to clone and reconstruct megabase-sized human loci in YACs and to introduce them into the mouse germline provides a powerful approach to elucidating the functional components of very large or crudely mapped loci as well as generating useful models of human disease. Furthermore, the use of such technology for substitution of mouse loci with their human equivalents could provide unique insights into the expression and regulation of human gene products during development, their communication with other systems, and their involvement in disease induction and progression.

[0048] An important practical application of such a strategy is the “humanization” of the mouse humoral immune system. Introduction of human immunoglobulin (Ig) loci into mice in which the endogenous Ig genes have been inactivated offers the opportunity to study the mechanisms underlying programmed expression and assembly of antibodies as well as their role in B-cell development. Furthermore, such a strategy could provide an ideal source for production of fully human monoclonal antibodies (mAbs)—an important milestone towards fulfilling the promise of antibody therapy in human disease. Fully human antibodies or constructs derived therefrom are expected to minimize the immunogenic and allergic responses intrinsic to mouse or mouse-derivatized mAbs and thus to increase the efficacy and safety of the administered antibodies/constructs. The use of fully human antibodies or constructs can be expected to provide a substantial advantage in the treatment of chronic and recurring human diseases, such as inflammation, autoimmunity, and cancer, which require repeated compound administrations.

[0049] One approach towards this goal was to engineer mouse strains deficient in mouse antibody production with large fragments of the human Ig loci in anticipation that such mice would produce a large repertoire of human antibodies in the absence of mouse antibodies. Large human Ig fragments would preserve the large variable gene diversity as well as the proper regulation of antibody production and expression. By exploiting the mouse machinery for antibody diversification and selection and the lack of immunological tolerance to human proteins, the reproduced human antibody repertoire in these mouse strains should yield high affinity antibodies against any antigen of interest, including human antigens. Using the hybridoma technology, antigen-specific human mAbs with the desired specificity could be readily produced and selected. This general strategy was demonstrated in connection with the generation of the first XenoMouse™ mouse strains (see Green et al. Nature Genetics 7:13-21 (1994)). The XenoMouse strains were engineered with yeast artificial chromosomes (YACs) containing 245 kb and 190 kb-sized germline configuration fragments of the human heavy chain locus and kappa light chain locus, respectively, which contained core variable and constant region sequences. The human Ig containing YACs proved to be compatible with the mouse system for both rearrangement and expression of antibodies and were capable of substituting for the inactivated mouse Ig genes. This was demonstrated by their ability to induce B cell development, to produce an adult-like human repertoire of fully human antibodies, and to generate antigen-specific human mAbs. These results also suggested that introduction of larger portions of the human Ig loci containing greater numbers of V genes, additional regulatory elements, and human Ig constant regions might recapitulate substantially the full repertoire that is characteristic of the human humoral response to infection and immunization. The work of Green et al. was extended to the introduction of greater than approximately 80% of the human antibody repertoire through introduction of megabase sized, germline configuration YAC fragments of the human heavy chain loci and kappa light chain loci, respectively. See Mendez et al. Nature Genetics 15:146-156 (1997) and U.S. patent application Ser. No. 08/759,620.

[0050] The production of the XenoMouse™ model is further discussed and delineated in U.S. patent application Ser. No. 07/466,008, Ser. No. 07/610,515, Ser. No. 07/919,297, Ser. No. 07/922,649, Ser. No. 08/031,801, Ser. No. 08/112,848, Ser. No. 08/234,145, Ser. No. 08/376,279, Ser. No. 08/430,938, Ser. No. 08/464,584, Ser. No. 08/464,582, Ser. No. 08/463,191, Ser. No. 08/462,837, Ser. No. 08/486,853, Ser. No. 08/486,857, Ser. No. 08/486,859, Ser. No. 08/462,513, Ser. No. 08/724,752, Ser. No. 08/759,620; and U.S. Pat. Nos. 6,162,963; 6,150,584; 6,114,598; 6,075,181, and 5,939,598 and Japanese Patent Nos. 3 068 180 B2, 3 068 506 B2, and 3 068 507 B2. See also Mendez et al. Nature Genetics 15:146-156 (1997) and Green and Jakobovits J. Exp. Med. 188:483-495 (1998), EP 0 463 151 B1, WO94/02602, WO96/34096, WO98/24893, WO 00/76310, and WO 03/47336.

[0051] In an alternative approach, others, including GenPharm International, Inc., have utilized a “minilocus” approach. In the minilocus approach, an exogenous Ig locus is mimicked through the inclusion of pieces (individual genes) from the Ig locus. Thus, one or more VH genes, one or more DH genes, one or more JH genes, a mu constant region, and a second constant region (preferably a gamma constant region) are formed into a construct for insertion into an animal. This approach is described in U.S. Pat. No. 5,545,807 to Surani et al. and U.S. Pat. Nos. 5,545,806; 5,625,825; 5,625,126; 5,633,425; 5,661,016; 5,770,429; 5,789,650; 5,814,318; 5,877,397; 5,874,299; and 6,255,458 each to Lonberg and Kay, U.S. Pat. Nos. 5,591,669 and 6,023,010 to Krimpenfort and Berns, U.S. Pat. Nos. 5,612,205; 5,721,367; and U.S. Pat. No. 5,789,215 to Berns et al., and U.S. Pat. No. 5,643,763 to Choi and Dunn, and GenPharm International U.S. patent application Ser. No. 07/574,748, Ser. No. 07/575,962, Ser. No. 07/810,279, Ser. No. 07/853,408, Ser. No. 07/904,068, Ser. No. 07/990,860, Ser. No. 08/053,131, Ser. No. 08/096,762, Ser. No. 08/155,301, Ser. No. 08/161,739, Ser. No. 08/165,699, Ser. No. 08/209,741. See also EP 0 546 073 B1, WO 92/03918, WO 92/22645, WO 92/22647, WO 92/22670, WO 93/12227, WO 94/00569, WO 94/25585, WO 96/14436, WO 97/13852, and WO 98/24884 and U.S. Pat. No. 5,981,175. See further Taylor et al. (1992), Chen et al. (1993), Tuaillon et al. (1993), Choi et al. (1993), Lonberg et al. (1994), Taylor et al. (1994), and Tuaillon et al. (1995), Fishwild et al. (1996).

[0052] Kirin has also demonstrated the generation of human antibodies from mice in which, through microcell fusion, large pieces of chromosomes, or entire chromosomes, have been introduced. See European Patent Application Nos. 773 288 and 843 961. Xenerex Biosciences is developing a technology for the potential generation of human antibodies. In this technology, SCID mice are reconstituted with human lymphatic cells, e.g., B and/or T cells. Mice are then immunized with an antigen and can generate an immune response against the antigen. See U.S. Pat. Nos. 5,476,996; 5,698,767; and 5,958,765.

[0053] In some embodiments, the constructs of the invention are “isolated” or “substantially pure” constructs. “Isolated” or “substantially pure”, when used to describe the constructs disclosed herein, means a construct that has been identified, separated and/or recovered from a component of its production environment. Preferably, the construct is free or substantially free of association with all other components from its production environment. Contaminant components of its production environment, such as that resulting from recombinant transfected cells, are materials that could interfere with diagnostic or therapeutic uses for the construct, and may include enzymes, hormones, and other proteinaceous or non-proteinaceous compounds. It is understood that the isolated or substantially pure construct may constitute from 5% to 99.9% by weight of the total protein/polypeptide content in a given sample, depending on the circumstances. The desired construct may be produced at a significantly higher concentration using an inducible promoter or high expression promoter. The definition includes the production of a construct in a wide variety of organisms and/or host cells that are known in the art. In certain embodiments, the construct will be purified (1) to a degree sufficient to obtain at least 15 residues of N-terminal or internal amino acid sequence by use of a spinning cup sequenator, or (2) to homogeneity by SDS-PAGE under non-reducing or reducing conditions using Coomassie Blue or, preferably, silver staining. Usually, however, an isolated construct will be prepared by at least one purification step.

[0054] According to one embodiment, the entire construct and/or the binding domains are in the form of one or more polypeptides or in the form of proteins. In addition to proteinaceous parts, such polypeptides or proteins may include non-proteinaceous parts (e.g. chemical linkers or chemical cross-linking agents such as glutaraldehyde).

[0055] Peptides are short chains of amino acid monomers linked by covalent peptide (amide) bonds. Hence, peptides fall under the broad chemical classes of biological oligomers and polymers. Amino acids that are part of a peptide or polypeptide chain are termed “residues” and can be consecutively numbered. All peptides except cyclic peptides have an N-terminal residue at one end and a C-terminal residue at the other end of the peptide. An oligopeptide consists of only a few amino acids (usually between two and twenty). A polypeptide is a longer, continuous, and unbranched peptide chain. Peptides are distinguished from proteins based on size, and as an arbitrary benchmark can be understood to contain approximately 50 or fewer amino acids. Proteins consist of one or more polypeptides, usually arranged in a biologically functional way. While aspects of the lab techniques applied to peptides versus polypeptides and proteins differ (e.g., the specifics of electrophoresis, chromatography, etc.), the size boundaries that distinguish peptides from polypeptides and proteins are not absolute. Therefore, in the context of the present invention, the terms “peptide”, “polypeptide” and “protein” may be used interchangeably, and the term “polypeptide” is often preferred.

[0056] Polypeptides may further form multimers such as dimers, trimers and higher oligomers, which consist of more than one polypeptide molecule, as mentioned above. Polypeptide molecules forming such dimers, trimers etc. may be identical or non-identical. The corresponding structures of higher order of such multimers are, consequently, termed homo- or heterodimers, homo- or heterotrimers etc. An example for a hereteromultimer is an antibody or immunoglobulin molecule, which, in its naturally occurring form, consists of two identical light polypeptide chains and two identical heavy polypeptide chains. The terms “peptide”, “polypeptide” and “protein” also refer to naturally modified peptides/polypeptides/proteins wherein the modification is accomplished e.g. by post-translational modifications like glycosylation, acetylation, phosphorylation and the like. A “peptide”, “polypeptide” or “protein” when referred to herein may also be chemically modified such as pegylated. Such modifications are well known in the art and described herein below.

[0057] The terms “selectively” and, “preferably, selectively”, “(specifically or immunospecifically) binds to”, “(specifically or immunospecifically) recognizes”, or “(specifically or immunospecifically) reacts with” mean in accordance with this invention that a construct or a binding domain selectively interacts or (immuno-)specifically interacts with a given epitope on the target molecule (antigen), here: CD3, respectively. This selective interaction or association occurs more frequently, more rapidly, with greater duration, with greater affinity, or with some combination of these parameters, to an epitope on the specific target (here: CD3epsilon) than to alternative substances (non-target molecules, e.g., here CD3gamma, etc.). Because of the sequence similarity between homologous proteins in different species, a construct or a binding domain that selectively and/or immunspecifically binds to its target (such as a human target) may, however, cross-react with homologous target molecules from different species (such as, from non-human primates). The terms “selectively binds to”, “specific/immunospecific binding”, etc. can hence include the binding of a construct or binding domain to epitopes or structurally related epitopes in more than one species. In the context of the present invention, a polypeptide of the present invention binds to its respective target structure in a particular manner. Preferably, a polypeptide according to the present invention comprises one paratope per binding domain which specifically or immunospecifically binds to”, “(specifically or immunospecifically) recognizes”, or “(specifically or immunospecifically) reacts with” its respective target structure. This means in accordance with this invention that a polypeptide or a binding domain thereof interacts or (immuno-)specifically interacts with a given epitope on the target molecule (antigen), namely CD3epsilon, and in certain embodiments with a given epitope on at least one further, such as a second and/or a third target molecule. This interaction or association occurs more frequently, more rapidly, with greater duration, with greater affinity, or with some combination of these parameters, to an epitope on the specific target than to alternative substances (non-target molecules). Because of the sequence similarity between homologous proteins in different species, an antibody construct or a binding domain that immunspecifically binds to its target (such as a human target) may, however, cross-react with homologous target molecules from different species (such as, from non-human primates). The term “specific/immunospecific binding” can hence include the binding of an antibody construct or binding domain to epitopes and/or structurally related epitopes in more than one species. The term “(immuno-) selectively binds does exclude the binding to structurally related epitopes.

[0058] In the context of the present invention, the term “epitope” refers to the part or region of the antigen that is selectively recognized/immunospecifically recognized by the binding structure, i.e. the paratope. An “epitope” is antigenic, and thus the term epitope is sometimes also referred to as “antigenic structure” or “antigenic determinant”. The part of the binding domain that binds to the epitope is called a paratope. Specific binding is believed to be accomplished by specific motifs in the amino acid sequence of the binding domain and the antigen. Thus, binding is achieved because of their primary, secondary and/or tertiary structure as well as the result of potential secondary modifications of said structures. The specific interaction of the paratope with its antigenic determinant may result in a simple binding of said site to the antigen. In some cases, the specific interaction may alternatively or additionally result in the initiation of a signal, e.g. due to the induction of a change of the conformation of the antigen, an oligomerization of the antigen, etc.

[0059] The epitopes of protein antigens are divided into two categories, conformational epitopes and linear epitopes, based on their structure and interaction with the paratope. A conformational epitope is composed of discontinuous sections of the antigen's amino acid sequence. These epitopes interact with the paratope based on the three-dimensional surface features and shape or tertiary structure (folding) of the antigen. Methods of determining the conformation of epitopes include, but are not limited to, x-ray crystallography, two-dimensional nuclear magnetic resonance (2D-NMR) spectroscopy and site-directed spin labelling and electron paramagnetic resonance (EPR) spectroscopy. By contrast, linear epitopes interact with the paratope based on their primary structure. A linear epitope is formed by a continuous sequence of amino acids from the antigen and typically includes at least 3 or at least 4, and more usually, at least 5 or at least 6 or at least 7, for example, about 8 to about 10 amino acids in a unique sequence.

[0060] A method for epitope mapping for a given human target protein is described in the following: A pre-defined region (a contiguous amino acid stretch) within said given human target protein is exchanged/replaced with a corresponding region of a target protein paralogue (so long as the binding domain is not cross-reactive with the paralogue used). These human target/paralogue chimeras are expressed on the surface of host cells (such as CHO cells). Binding of the antibody or construct can be tested via FACS analysis. When the binding of the antibody or construct to the chimeric molecule is entirely abolished, or when a significant binding decrease is observed, it can be concluded that the region of human target which was removed from this chimeric molecule is relevant for the immunospecific epitope-paratope recognition. Said decrease in binding is preferably at least 10%, 20%, 30%, 40%, or 50%; more preferably at least 60%, 70%, or 80%, and most preferably 90%, 95% or even 100% in comparison to the binding to human (wild-type) target, whereby binding to the human target is set to be 100%. Alternatively, the above described epitope mapping analysis can be modified by introducing one or several point mutations into the sequence of the human target. These point mutations can e.g. reflect the differences between the human target and its paralogue.

[0061] A further method to determine the contribution of a specific residue of a target antigen to the recognition by a construct or binding domain is alanine scanning (see e.g. Morrison KL & Weiss G A. Curr Opin Chem Biol. 2001 June; 5(3):302-7), where each residue to be analyzed is replaced by alanine, e.g. via site-directed mutagenesis. Alanine is used because of its non-bulky, chemically inert, methyl functional group that nevertheless mimics the secondary structure references that many of the other amino acids possess. Sometimes bulky amino acids such as valine or leucine can be used in cases where conservation of the size of mutated residues is desired.

[0062] The interaction between the binding domain and the epitope of the target antigen implies that a binding domain exhibits appreciable or significant affinity for the epitope/the target antigen (here: CD3) and, generally, does not exhibit significant affinity for proteins or antigens other than the target antigen—notwithstanding the above discussed cross-reactivity with homologous targets e.g. from other species. “Significant affinity” includes binding with an affinity (dissociation constant, KD) of ≤10⁻⁶ M. Preferably, binding is considered specific when the binding affinity is ≤10⁻⁷ M, ≤10⁻⁸ M, ≤10⁻⁹ M, ≤10⁻¹⁰ M, or even ≤10¹¹ M, or ≤10⁻¹² M. Whether a binding domain (immuno-)specifically reacts with or binds to a target can be tested readily e.g. by comparing the affinity of said binding domain to its desired target protein or antigen with the affinity of said binding domain to non-target proteins or antigens (here: proteins other than CD3). Preferably, a construct of the invention does not significantly bind to proteins or antigens other than CD3 (i.e., the CD3 binding domain does not bind to proteins other than CD3)—unless any further binding domain(s) directed against a further target is/are deliberately introduced into the construct of the invention, in which case the binding of that binding domain to its specific target is also provided by the present invention.

[0063] It is envisaged that the affinity of the first domain for human CD3epsilon is ≤100 nM, ≤90 nM, ≤80 nM, ≤70 nM, ≤60 nM, ≤50 nM, ≤40 nM, ≤30 nM or ≤20 nM. These values are preferably measured in a cell-based assay, such as a Scatchard assay. Other methods of determining the affinity are also well-known. These values are preferably measured in a surface plasmon resonance assay, such as a Biacore assay.

[0064] The term “does not significantly bind” and “does not selectively bind” mean that a construct or binding domain of the present invention does not bind to a protein or antigen other than said CD3, when said protein or antigen is expressed on the surface of a cell. The construct hence shows reactivity of ≤30%, preferably ≤20%, more preferably ≤10%, particularly preferably ≤9%, ≤8%, ≤7%, ≤6%, ≤5%, ≤4%, ≤3%, ≤2%, or ≤1% with proteins or antigens other than CD3 (when said proteins or antigens are expressed on the surface of a cell), whereby binding to CD3, respectively, is set to be 100%. The “reactivity” can e.g. be expressed in an affinity value (see above).

[0065] It is envisaged that the construct of the invention (and more specifically the domain comprising a paratope/binding domain that binds to human CD3epsilon) does not bind or does not significantly bind to CD3epsilon paralogues, more specifically to human CD3epsilon paralogues and/or to macaque/cyno CD3epsilon paralogues. It is also envisaged that the construct does not bind or does not significantly bind to (human or macaque/cyno) CD3epsilon paralogues on the surface of a target cell.

[0066] The VH region as part of the binding domain binding to an extracellular epitope of the human CD3ε chain comprises a CDR-H1, a CDR-H2 and CDR-H3 sequence as set out herein above. The CDR sequences contain placeholders denoted as “X” for a given amino acid residue that can take the place of the placeholder as is common practice in the art. The placeholders are consecutively numbered in the format X₁, X₂, X₃, and so forth, per given CDR sequence. The amino acid residues that can take place of the placeholder in the recited CDR sequences are listed according to preference, wherein the first listed amino acid is the most preferred, the second listed is the second most preferred, and so forth, if not otherwise specified, e.g. in other embodiments. If a sequence contains more than one placeholder, the same applies in relation to the preference of the amino acids; namely, it is the combination of the first listed amino acid residue for each of the placeholders that is most preferred, the combination of the second listed amino acid residue for each of the placeholders that is second most preferred, and so forth. This hierarchy of preference does not exclude the combination of amino acid residues for each of the placeholders independent of said preference hierarchy so that amino acid residues of different preference are combined. The same hierarchy is true for all amino acid residues that are listed herein below to take the place of a place holder in an amino acid sequence described herein below. Accordingly, the above also applies for the placeholders denoted as “X” in the sequences of the VH and VL sequences and any other sequences recited throughout the specification.

[0067] The CDR-H1 sequence comprises the amino acid sequence of X₁YAX₂N, where X, is K, V, S, G, R, T, or I; and X₂ is M or I. Following the above-explained hierarchy as regards the placeholder amino acids, the amino acids for the placeholders X₁ and X₂ are listed according to their preference, wherein the first listed amino acid is the most preferred, the second listed is the second-most preferred, and so forth. For X₁, the amino acid K is most preferred, and for X₂, the amino acid M is most preferred. A preferred combination is M for X₂ in combination with any of the amino acid residues of X₁, such as the combinations for X₁ and X₂, respectively, selected from K and M, V and M, S and M, most preferred the combination K and M. Another preferred combination is K and I, for X₁ and X₂, respectively. Preferred examples of the CDR-H1 sequence are selected from KYAMN, VYAMN, SYAMN, GYAMN, RYAMN, TYAMN, IYAMN, and KYAIN, wherein KYAMN or KYAIN is most preferred.

[0068] The CDR-H2 sequence comprises the amino acid sequence of RIRSKYNNYATYYADX₁VK X₂, where X, is S or Q; and X₂ is D, G, K, S, or E. For X₁, the amino acid S is most preferred, and for X₂, the amino acid D is most preferred. A preferred combination is S for X₁ in combination with any of the amino acid residues of X₂, such as the combinations for X₁ and X₂, respectively, selected from S and D, S and G, S and K, S and S, most preferred the combination S and D. Preferred examples of the CDR-H2 sequence are selected from RIRSKYNNYATYYADSVKD, RIRSKYNNYATYYADSVKK, RIRSKYNNYATYYADSVKS, RIRSKYNNYATYYADSVKE, RIRSKYNNYATYYADSVKG, and RIRSKYNNYATYYADQVKD, wherein RIRSKYNNYATYYADSVKD is most preferred.

[0069] The CDR-H3 sequence comprises the amino acid sequence of HX₁NFGNSYX₂SX₃X₄AY, where X, is G, R, or A; X₂ is I, L, V, or T; X₃ is Y, W or F; and X₄ is W, F or Y. For X₁, the amino acid G is most preferred; for X₂, the amino acid I is most preferred; for X₃, the amino acid Y is most preferred; and for X₄, the amino acid W is most preferred. Preferred examples of the CDR-H3 sequence are selected from HGNFGNSYISYWAY, HGNFGNSYLSWWAY, HGNFGNSYTSYYAY, HRNFGNSYLSWFAY, HGNFGNSYVSFFAY, HGNFGNSYISWWAY, HGNFGNSYVSWWAY, HGNFGNSYLSYFAY, HGNFGNSYLSFWAY, HANFGNSYISYWAY, and HGNFGNSYVSWFAY, wherein HGNFGNSYISYWAY is most preferred.

[0070] The CDR-L1 sequence comprises the amino acid sequence of X₁SSTGAVTX₂X₃X₄YX₅N, where X, is G, R, or A; X₂ is S or T; X₃ is G or S; X₄ is N or Y; and X₅ is P or A. For X₁, the amino acid G is most preferred; for X₂, the amino acid S is most preferred; for X₃, the amino acid G is most preferred; for X₄, the amino acid N is most preferred; and for X₅, the amino acid P is most preferred. Preferred examples of the CDR-L1 sequence are selected from GSSTGAVTSGNYPN, RSSTGAVTSGYYPN, GSSTGAVTSGYYPN, ASSTGAVTSGNYPN, and RSSTGAVTTSNYAN, wherein GSSTGAVTSGNYPN is most preferred.

[0071] The CDR-L2 sequence comprises the amino acid sequence of X₁TX₂X₃X₄X₅X₆; where X, is G or A; X₂ is K, D, or N; X₃ is F, M or K; X₄ is L or R; X₅ is A, P, or V; and X₆ is P or S. For X₁, the amino acid G is most preferred; for X₂, the amino acid K is most preferred; for X₃, the amino acid F is most preferred; for X₄, the amino acid L is most preferred; for X₅, the amino acid A is most preferred and for X₆, the amino acid P is most preferred. Preferred examples of the CDR-L2 sequence are selected from GTKFLAP, ATDMRPS, GTKFLVP, and GTNKRAP, wherein GTKFLAP is most preferred.

[0072] The CDR-L3 sequence comprises the amino acid sequence of X₁LWYSNX₂WV, where X, is V, A, or T; and X₂ is R or L. For X₁, the amino acid V is most preferred, and for X₂, the amino acid R is most preferred. Preferred combinations are R for X₂ in combination with any of the amino acid residues of X₁, such as the combinations for X₁ and X₂, respectively, selected from V and R, A and R, T and R, most preferred the combination V and R. Preferred examples of the CDR-L3 sequence are selected from VLWYSNRWV, ALWYSNRWV, TLWYSNRWV, and ALWYSNLWV, wherein VLWYSNRWV is most preferred.

[0073] In a preferred embodiment, said VH region of i) comprises: a CDR-H1 sequence comprising or consisting of the amino acid sequence of X₁YAX₂N, where X, is K, V, S, G, R, or I; and X₂ is M or I; a CDR-H2 sequence of RIRSKYNNYATYYADX₁VKX₂, where X, is S or Q; and X₂ is D, G, K, S, or E; and a CDR-H3 sequence of HX₁NFGNSYX₂SX₃X₄AY, where X, is G, R, or A; X₂ is I, L, V, or T; X₃ is Y, W or F; and X₄ is W, F or Y; and said VL region of ii) comprises: a CDR-L1 sequence of X₁SSTGAVTSGX₂YPN, where X, is G, R, or A; and X₂ is N or Y; a CDR-L2 sequence of X₁TX₂X₃X₄X₅X₆; where X, is G or A; X₂ is K or D; X₃ is F or M; X₄ is L or R; X₅ is A, P, or V; and X₆ is P or S; and a CDR-L3 sequence of X₁LWYSNRWV, where X, is V, A, or T; and wherein said one or more CDR sequences of the VH region of i) and/or of the VL region of ii) comprise one or more amino acid substitutions selected from X₂4V or X₂4F in CDR-H1; D15 (preferably E), X₁16A in CDR-H2; H1 (preferably A or N), X₁2E, F4 (preferably I), and/or N6 (preferably S or T) in CDR-H3; and W93 (preferably Y) in CDR-L3.

[0074] Said CDR-H1 sequence comprises or consists of the amino acid sequence of X₁YAX₂N, where X, is K, V, S, G, R, or I; and X₂ is M or I. For X₁, the amino acid K is most preferred, and for X₂, the amino acid M is most preferred. A preferred combination is M for X₂ in combination with any of the amino acid residues of X₁, such as the combinations for X₁ and X₂, respectively, selected from K and M, V and M, S and M, most preferred the combination K and M. Another preferred combination is K and I, for X₁ and X₂, respectively. Preferred examples of the CDR-H1 sequence are selected from KYAMN, VYAMN, SYAMN, GYAMN, RYAMN, IYAMN, and KYAIN, wherein KYAMN or KYAIN is preferred, wherein KYAMN is most preferred.

[0075] Said CDR-H2 sequence comprises or consist of the amino acid sequence of RIRSKYNNYATYYADX₁VK X₂, where X, is S or Q; and X₂ is D, G, K, S, or E. For X₁, the amino acid S is most preferred, and for X₂, the amino acid D is most preferred. A preferred combination is S for X₁ in combination with any of the amino acid residues of X₂, such as the combinations for X₁ and X₂, respectively, selected from S and D, S and G, S and K, S and S, most preferred the combination S and D. Preferred examples of the CDR-H2 sequence are selected from RIRSKYNNYATYYADSVKD, RIRSKYNNYATYYADSVKK, RIRSKYNNYATYYADSVKS, RIRSKYNNYATYYADSVKE, RIRSKYNNYATYYADSVKG, and RIRSKYNNYATYYADQVKD, wherein RIRSKYNNYATYYADSVKD is most preferred.

[0076] The CDR-H3 sequence comprises the amino acid sequence of HX₁NFGNSYX₂SX₃X₄AY, where X, is G, R, or A; X₂ is I, L, V, or T; X₃ is Y, W or F; and X₄ is W, F or Y. For X₁, the amino acid G is most preferred; for X₂, the amino acid I is most preferred; for X₃, the amino acid Y is most preferred; and for X₄, the amino acid W is most preferred. Preferred examples of the CDR-H3 sequence are selected from HGNFGNSYISYWAY, HGNFGNSYLSWWAY, HGNFGNSYTSYYAY, HRNFGNSYLSWFAY, HGNFGNSYVSFFAY, HGNFGNSYISWWAY, HGNFGNSYVSWWAY, HGNFGNSYLSYFAY, HGNFGNSYLSFWAY, HANFGNSYISYWAY, and HGNFGNSYVSWFAY, wherein HGNFGNSYISYWAY is most preferred.

[0077] The CDR-L1 sequence comprises the amino acid sequence of X₁SSTGAVTSGX₂YPN, where X, is G, R, or A; and X₂ is N or Y. For X₁, the amino acid G is most preferred; and for X₂, the amino acid N is preferred. Preferred examples of the CDR-L1 sequence are selected from GSSTGAVTSGNYPN, RSSTGAVTSGYYPN, GSSTGAVTSGYYPN, and ASSTGAVTSGNYPN, wherein GSSTGAVTSGNYPN or ASSTGAVTSGNYPN is preferred, wherein GSSTGAVTSGNYPN is most preferred.

[0078] The CDR-L2 sequence comprises the amino acid sequence of X₁TX₂X₃X₄X₅X₆; where X, is G or A; X₂ is K or D; X₃ is F or M; X₄ is L or R; X₅ is A, P, or V; and X₆ is P or S. For X₁, the amino acid G is most preferred; for X₂, the amino acid K is most preferred; for X₃, the amino acid F is most preferred; for X₄, the amino acid L is most preferred; for X₅, the amino acid A is most preferred and for X₆, the amino acid P is most preferred. Preferred examples of the CDR-L2 sequence are selected from GTKFLAP, ATDMRPS, and GTKFLVP, wherein GTKFLAP or GTKFLVP is preferred, wherein GTKFLAP is most preferred.

[0079] The CDR-L3 sequence comprises the amino acid sequence of X₁LWYSNRWV, where X, is V, A, or T, wherein the amino acid V is most preferred. Preferred examples of the CDR-L3 sequence are selected from VLWYSNRWV, ALWYSNRWV, and TLWYSNRWV, wherein VLWYSNRWV or TLWYSNRWV is more preferred, wherein VLWYSNRWV is most preferred.

[0080] In a further preferred embodiment, said VH region of i) comprises: a CDR-H1 sequence comprising or consisting of the amino acid sequence of X₁YAX₂N, where X, is K, V, S, R, or I; and X₂ is M or I; a CDR-H2 sequence of RIRSKYNNYATYYADX₁VKX₂, where X, is S or Q; and X₂ is D, G, K, or S; and a CDR-H3 sequence of HX₁NFGNSYX₂SX₃X₄AY, where X, is G or A; X₂ is I, L, V, or T; X₃ is Y, W or F; and X₄ is W, F or Y; and said VL region of ii) comprises: a CDR-L1 sequence of X₁SSTGAVTSGX₂YPN, where X, is G or A; and X₂ is N or Y; a CDR-L2 sequence of GTKFLX₁P; where X, is A or V; and a CDR-L3 sequence of X₁LWYSNRWV, where X, is V, A, or T; and wherein said one or more CDR sequences of the VH region of i) and/or of the VL region of ii) comprise one or more amino acid substitutions selected from X₂4V or X₂4F in CDR-H1; D15 (preferably E), X₁16A in CDR-H2; H1 (preferably A or N), X₁2E, F4 (preferably I), and/or N6 (preferably S or T) in CDR-H3; and W93 (preferably Y) in CDR-L3.

[0081] Said CDR-H1 sequence comprises or consists of the amino acid sequence of X₁YAX₂N, where X, is K, V, S, R, or I; and X₂ is M or I. For X₁, the amino acid K is most preferred, and for X₂, the amino acid M is most preferred. A preferred combination is M for X₂ in combination with any of the amino acid residues of X₁, such as the combinations for X₁ and X₂, respectively, selected from K and M, V and M, S and M, most preferred the combination K and M. Another preferred combination is K and I, for X₁ and X₂, respectively. Preferred examples of the CDR-H1 sequence are selected from KYAMN, VYAMN, SYAMN, RYAMN, IYAMN, and KYAIN, wherein KYAMN or KYAIN is preferred, wherein KYAMN is most preferred.

[0082] Said CDR-H2 sequence comprises or consist of the amino acid sequence of RIRSKYNNYATYYADX₁VKX₂, where X, is S or Q; and X₂ is D, G, K, or S. For X₁, the amino acid S is most preferred, and for X₂, the amino acid D is most preferred. A preferred combination is S for X₁ in combination with any of the amino acid residues of X₂, such as the combinations for X₁ and X₂, respectively, selected from S and D, S and G, S and K, S and S, most preferred the combination S and D. Preferred examples of the CDR-H2 sequence are selected from RIRSKYNNYATYYADSVKD, RIRSKYNNYATYYADSVKK, RIRSKYNNYATYYADSVKS, RIRSKYNNYATYYADSVKG, and RIRSKYNNYATYYADQVKD, wherein RIRSKYNNYATYYADSVKD or RIRSKYNNYATYYADQVKD is preferred, wherein RIRSKYNNYATYYADSVKD is most preferred.

[0083] Said CDR-H3 sequence comprises or consist of the amino acid sequence of HX₁NFGNSYX₂SX₃X₄AY, where X, is G or A; X₂ is I, L, V, or T; X₃ is Y, W or F; and X₄ is W, F or Y. For X₁, the amino acid G is most preferred; for X₂, the amino acid I is most preferred; for X₃, the amino acid Y is most preferred; and for X₄, the amino acid W is most preferred. Preferred examples of the CDR-H3 sequence are selected from HGNFGNSYISYWAY, HGNFGNSYLSWWAY, HGNFGNSYTSYYAY, HGNFGNSYVSFFAY, HGNFGNSYISWWAY, HGNFGNSYVSWWAY, HGNFGNSYLSYFAY, HGNFGNSYLSFWAY, and HANFGNSYISYWAY, wherein HGNFGNSYISYWAY or HANFGNSYISYWAY is preferred, wherein HGNFGNSYISYWAY is most preferred.

[0084] Said CDR-L1 sequence comprises or consists the amino acid sequence of X₁SSTGAVTSGX₂YPN, where X, is G or A; and X₂ is N or Y. For X₁, the amino acid G is most preferred; and for X₂, the amino acid N is preferred. Preferred examples of the CDR-L1 sequence are selected from GSSTGAVTSGNYPN, GSSTGAVTSGYYPN, and ASSTGAVTSGNYPN, wherein GSSTGAVTSGNYPN or ASSTGAVTSGNYPN is preferred, wherein GSSTGAVTSGNYPN is most preferred.

[0085] Said CDR-L2 sequence comprises or consists of the amino acid sequence of GTKFLX₁P; where X, is A or V. For X₁, the amino acid A is preferred. Said CDR-L2 sequence is GTKFLAP or GTKFLVP, wherein GTKFLAP is preferred.

[0086] The CDR-L3 sequence comprises or consists of the amino acid sequence of X₁LWYSNRWV, where X, is V, A, or T, wherein the amino acid V is most preferred. Preferred examples of the CDR-L3 sequence are selected from VLWYSNRWV, ALWYSNRWV, and TLWYSNRWV, wherein VLWYSNRWV or TLWYSNRWV is more preferred, wherein VLWYSNRWV is most preferred.

[0087] In an even more preferred embodiment, said VH region of i) comprises: a CDR-H1 sequence comprising or consisting of the amino acid sequence of X₁YAMN, where X, is K or S; a CDR-H2 sequence of RIRSKYNNYATYYADSVKX₁, where X, is D or G; and a CDR-H3 sequence of HGNFGNSYX₁SX₂WAY, where X, is I or V; and X₂ is Y or W; and said VL region of ii) comprises: a CDR-L1 sequence of GSSTGAVTSGX₁YPN, where X, is N or Y; a CDR-L2 sequence of GTKFLAP; and a CDR-L3 sequence of X₁LWYSNRWV, where X, is V or A; and wherein said one or more CDR sequences of the VH region of i) and/or of the VL region of ii) comprise one or more amino acid substitutions selected from M4V or M4F in CDR-H1; D15 (preferably E), S16A in CDR-H2; H1 (preferably A or N), G2E, F4 (preferably I), and/or N6 (preferably S or T) in CDR-H3; and W93 (preferably Y) in CDR-L3.

[0088] Said CDR-H1 sequence comprises or consists of the amino acid sequence of X₁YAMN, where X, is K or S, wherein the amino acid K is preferred. Said CDR-H1 sequence is KYAMN or SYAMN, wherein KYAMN is most preferred.

[0089] Said CDR-H2 sequence comprises or consist of the amino acid sequence of RIRSKYNNYATYYADSVKX₁, where X, is D or G. For X₁, the amino acid D is preferred. Said CDR-H2 sequence is RIRSKYNNYATYYADSVKD or RIRSKYNNYATYYADSVKG, wherein RIRSKYNNYATYYADSVKD is preferred.

[0090] Said CDR-H3 sequence comprises or consist of the amino acid sequence of HGNFGNSYX₁SX₂WAY, where X, is I or V; and X₂ is Y or W. For X₁, the amino acid I is preferred; for X₂, the amino acid Y is preferred. Said CDR-H3 sequence is HGNFGNSYISYWAY or HGNFGNSYVSWWAY, wherein HGNFGNSYISYWAY is preferred.

[0091] Said CDR-L1 sequence comprises or consists the amino acid sequence of GSSTGAVTSGX₁YPN, where X, is N or Y. For X₁, the amino acid N is preferred. Said CDR-L1 sequence is GSSTGAVTSGNYPN or GSSTGAVTSGYYPN, wherein GSSTGAVTSGNYPN is preferred.

[0092] Said CDR-L2 sequence comprises or consists of the amino acid sequence of GTKFLAP.

[0093] The CDR-L3 sequence comprises or consists of the amino acid sequence of X₁LWYSNRWV, where X, is V or A, wherein V is preferred. Said CDR-L3 sequence VLWYSNRWV or ALWYSNRWV, wherein VLWYSNRWV is preferred.

[0094] Each of the CDR-H1, CDR-H2, CDR-H3, CDR-L1, CDR-L2 and CDR-L3 sequences be freely combined in the format CDR-H1, CDR-H2, CDR-H3, CDR-L1, CDR-L2, CDR-L3 (this is the preferred orientation of the VH and the VL region) or CDR-L1, CDR-L2, CDR-L3, CDR-H1, CDR-H2, CDR-H3 and exhibiting the recited binding to an extracellular epitope of the human CD3ε chain.

[0095] Preferred combinations of CDR-L1 to L3 sequences of the VL region and preferred combinations of CDR-H1 to H3 sequences of the VH region are listed in the below Table 1.

TABLE 1

| CDR-L1 | CDR-L2 | CDR-L3 |
|---|---|---|
| GSSTGAVTSGYYP | GTKFLAP | ALWYSNRWV |
| N | | |
| RSSTGAVTSGYYP | ATDMRPS | ALWYSNRWV |
| N | | |
| GSSTGAVTSGNYP | GTKFLAP | VLWYSNRWV |
| N | | |
| ASSTGAVTSGNYP | GTKFLVP | TLWYSNRWV |
| N | | |
| RSSTGAVTTSNYA | GTNKRAP | ALWYSNLWV |
| N | | |
| CDR-H1 | CDR-H2 | CDR-H3 |
| IYAMN | RIRSKYNNYATYYADSVKS | HGNFGNSYVSFFAY |
| KYAMN | RIRSKYNNYATYYADSVKD | HGNFGNSYISYWAY |
| SYAMN | RIRSKYNNYATYYADSVKG | HGNFGNSYLSFWAY |
| RYAMN | RIRSKYNNYATYYADSVKG | HGNFGNSYLSYFAY |
| VYAMN | RIRSKYNNYATYYADSVKK | HGNFGNSYLSWWAY |
| KYAMN | RIRSKYNNYATYYADSVKS | HGNFGNSYTSYYAY |
| GYAMN | RIRSKYNNYATYYADSVKE | HRNFGNSYLSWFAY |
| VYAMN | RIRSKYNNYATYYADSVKK | HGNFGNSYISWWAY |
| SYAMN | RIRSKYNNYATYYADSVKG | HGNFGNSYVSWWAY |
| KYAIN | RIRSKYNNYATYYADQVKD | HANFGNSYISYWAY |
| TYAMN | RIRSKYNNYATYYADSVKD | HGNFGNSYVSWFAY |

[0096] Preferably, any of the above listed combinations of CDR-L1 to L3 combinations is combined with any of the above-listed combinations CDR-H1 to H3 as part of the binding domain binding to an extracellular of the human CD3ε chain. In other words, the VL region comprises or consists of as CDR-L1, CDR-L2, CDR-L3 sequence, in this order,

GSSTGAVTSGYYPN, GTKFLAP, ALWYSNRWV;
RSSTGAVTSGYYPN, ATDMRPS, ALWYSNRWV;
GSSTGAVTSGNYPN, GTKFLAP, VLWYSNRWV;
ASSTGAVTSGNYPN, GTKFLVP, TLWYSNRWV;
or
RSSTGAVTTSNYAN, GTNKRAP, ALWYSNLWV;

the VL region comprises or consists of as CDR-H1, CDR-H2, CDR-H3 sequence, in this order,

IYAMN, RIRSKYNNYATYYADSVKS, HGNFGNSYVSFFAY;
KYAMN, RIRSKYNNYATYYADSVKD, HGNFGNSYISYWAY;
SYAMN, RIRSKYNNYATYYADSVKG, HGNFGNSYLSFWAY;
RYAMN, RIRSKYNNYATYYADSVKG, HGNFGNSYLSYFAY;
VYAMN, RIRSKYNNYATYYADSVKK, HGNFGNSYLSWWAY;
KYAMN, RIRSKYNNYATYYADSVKS, HGNFGNSYTSYYAY;
GYAMN, RIRSKYNNYATYYADSVKE, HRNFGNSYLSWFAY;
VYAMN, RIRSKYNNYATYYADSVKK, HGNFGNSYISWWAY;
SYAMN, RIRSKYNNYATYYADSVKG, HGNFGNSYVSWWAY;
KYAIN, RIRSKYNNYATYYADQVKD, HANFGNSYISYWAY;
or
TYAMN, RIRSKYNNYATYYADSVKD, HGNFGNSYVSWFAY.

In accordance with the invention, preferred CDR sequence combinations of the VH and the VL regions, listed in the order CDR-H1, CDR-H2, CDR-H3, CDR-L1, CDR-L2, CDR-L3, are as defined in SEQ ID NOs: 118 to 123, 166 to 171, 356 to 361, 546 to 551, 724 to 729, 922 to 927, 1100 to 1105, 1290 to 1295, 1468 to 1473, 1658 to 1663, 1848 to 1853.
Most preferred is that the VL region comprises as CDR-L1, CDR-L2, CDR-L3 sequence, listed in this order,

### GSSTGAVTSGNYPN, GTKFLAP, VLWYSNRWV; and

[0097] the VL region comprises as CDR-H1, CDR-H2, CDR-H3 sequence, listed in this order, KYAMN, RIRSKYNNYATYYADSVKD, HGNFGNSYISYWAY; as depicted in SEQ ID NOs: 1848 to 1853. Preferably the orientation of the CDRs is VH to VL, i.e. the orientation of the variable regions is from N- to C-terminus VH to VL.

[0098] In accordance with the invention, said CDR sequences of the VH and/or the VL region comprise one or more amino acid substitutions. As is common in the art, the position and nature of amino acid substitutions are denoted herein by indicating the original amino acid residue at the position to be substituted and the amino acid used for substitution in the format of, e.g., F41, wherein “F” denotes the original amino acid residue occurring at position “4” of the given amino acid sequence and “I” denotes the amino acid residue which substituted “F” at position 4. In case substitution is by any amino acid residue (other than the original amino acid residue), no amino acid residue is indicated, but only the originally occurring amino acid residue and its position in the given amino acid sequence, so that the previous example would be denoted as “F4” only. Preferably, only naturally occurring amino acids are used for substitution.

[0099] The VH region of i) and/or VL region of ii) comprise one or more amino acid substitutions as specified herein in one or more CDR sequences as recited herein above. Accordingly, at least one of the recited amino acid substitutions of the variable regions is comprised in said binding domain binding to an extracellular epitope of the human CD3ε chain. Said at least one or one or more amino acid substitution, in the case that only one amino acid substation is present, can be present in a CDR sequence in said VH or said VL region or, in case more than one amino acid substitution is present, in CDRs in both the VH and the VL region or restricted to CDR sequences in only the VH or the VL region. In certain embodiments where there are more than one amino acid substitutions, the substitutions are in the VH and the VL region or, alternatively, only in one variable region. Preferably, the substitutions are in the CDRs of the VH and the VL region.

[0100] In case the CDR-H1 is to comprise an amino acid substitution at position 4 it is, preferably, the substitution of the original amino acid with the amino acid V. Preferably, the CDR-H1 sequence is KYAIN or KYAMN, i.e. comprising none of said recited amino acid substitutions.

[0101] In CDR-H2, the amino acid substitution at position 15 is, preferably, D15E, or the amino acid substitution at position 16 with amino acid A. Preferably, CDR-H1 comprises the amino acid residue substitution at position 16 with amino acid A; in this case, a preferred amino acid for the last amino acid of CDR-H2 is D or G, most preferred D. Hence, a preferred CDR-H2 sequence is RIRSKYNNYATYYADAVKD or RIRSKYNNYATYYADAVKG, with RIRSKYNNYATYYADAVKD more preferred. In case CDR-H2 contains two amino acid substitutions, the combination of the amino acid E at position 15 and amino acid A at position 16 are preferred; in this case, a preferred amino acid for the last amino acid of CDR-H2 is G. Hence, a preferred CDR-H2 sequence for the combination of the amino acid E at position 15 and amino acid A at position 16 is RIRSKYNNYATYYAEAVKG.

[0102] In CDR-H3, the amino acid substitutions are at position 1, preferably a substitution with amino acid A or N, at position 2 with amino acid E, at position 4, preferably with amino acid I, and at position 6, preferably with amino acid S or T. Preferably, CDR-H3 comprises the amino acid A or N at position 1, the amino acid S or T at position 6; in this case and if placeholders are present in the CDR-H3 sequence at the indicated positions, preferred amino acids for X₁ are G or A, most preferred G; for X₂ is I; for X₃ is Y; and for X₄ are W or Y. In case CDR-H3 comprises two amino acid substitutions, preferred combinations are the amino acid A at position 1 and the amino acid S at position 6; and the amino acid N at position 1 and the amino acid T at position 6; in this case and if placeholders are present in the CDR-H3 sequence at the indicated positions, a preferred amino acid for X₁ is G or A, most preferred G; for X₂ is I, for X₃ is Y, and for X₄ are W and F. In case CDR-H3 comprises three amino acid substitutions, preferred combinations are the amino acid A at position 1, the amino acid I at position 4, and the amino acid S at position 6; and the amino acid N at position 1, the amino acid I at position 4 and the amino acid T at position 6, in this case and if placeholders are present in the CDR-H3 sequence at the indicated positions, a preferred amino acid for X₂ is I, for X₃ is Y, and for X₄ are W and F. In case CDR-H3 comprises four amino acid substitutions, a preferred combination is the amino acid N at position 1, the amino acid E at position 2, the amino acid I at position 4, and the amino acid T at position 6; in this case and if placeholders are present in the CDR-H3 sequence at the indicated positions, a preferred amino acid for X₂ is I, for X₃ is Y, and for X₄ is W. Hence, preferred CDR-H3 sequences are selected from AGNFGSSYISYWAY, NENIGTSYISYWAY, AGNFGTSYISYWAY, NANFGTSYISYFAY, and AGNFGSSYISYFAY, with AGNFGSSYISYWAY and AGNFGSSYISYFAY most preferred.

[0103] In CDR-L3, the amino acid substitution at position 1 is with amino acid L or the amino acid substitution is W93, preferably W93Y (which may also be referred to as X₁93Y), in the sequence of X₁LWYSNX₂WV, where X, is V, A, or T; and X₂ is R or L. Preferably, the CDR-L3 sequence is VLYYSNRWV when CDR-L3 comprises only one amino acid substitution. It is preferred, however, that CDR-L3 does not comprise said X₁1L and W93 amino acid substitution, in which case a preferred CDR-L3 sequence is VLYYSNRWV.

[0104] Without wishing to be bound by a specific scientific theory, each of the above recited amino acid substitution(s) lead(s) to an increase in thermal stability of the binding domain binding to an extracellular epitope of the human CD3ε chain comprising or consisting of a VH region linked to a VL region as described herein as compared to the binding domain binding to an extracellular epitope of the human CD3ε chain comprising or consisting of a VH region linked to a VL region sequence that is unmodified, i.e. does not contain said amino acid residue substitution(s). Said increase of the temperature stability is, preferably, measured by the well know and also herein described method of Differential Scanning Fluorimetry (DSF). Said method is, e.g., described in Wen et al., “Nano differential scanning fluorimetry for comparability studies of therapeutic proteins”, Analytical Biochemistry, Volume 593, 2020, 113581, ISSN 0003-2697; or Dart, M. L., et al. (2018). “Homogeneous Assay for Target Engagement Utilizing Bioluminescent Thermal Shift”. ACS medicinal chemistry letters, 9(6), 546-551). As evident from the example section, it was shown that the amino acid substitutions or combinations thereof as defined herein result in an increased thermal stability (see Example 1, Table 2 and 3) as compared to the unmodified CD3 binding domain defined herein (“I2C”) while the cytotoxic activity was maintained which was not the case with a prior art method to improve thermal stability, namely the CC44/100 cys clamp, in which an additional disulfide bond was engineered for stabilizing (Reiter, Y. et al., 1994) by replacing the amino acid residues with cysteine residues at position 44 in the heavy chain variable region and at position 100 in the light chain variable region (numbering scheme according to Kabat et al., 1991) of the unmodified CD3 binding domain defined herein (VH and VL SEQ ID NOs: 1854 and 1855, respectively; see Example 2, Table 5). The VH and VL region combinations of the CD3epsilon binding domain described herein are therefore temperature stabilized as compared to the VH and VL region sequence that does not contain the given substitution(s) that are introduced at the positions defined herein.

[0105] In a preferred embodiment of the polypeptide or polypeptide construct of claim 1 of the invention, in addition to said one amino acid substitution or a combination thereof as defined in iii) X₂ is I in said CDR-H1 sequence; X₂ is G in said CDR-H2 sequence; X₁ is A, X₄ is F in said CDR-H3 sequence; and/or X₁ is A in said CDR-L3 sequence. The one amino acid substitution or combination thereof as defined herein is/are in addition combined with specific amino acids at specific positions in the CDRs. Hence, at least one of the recited amino acid substitutions in accordance with iii) is present and at least one of X₂ is G in said CDR-H2 sequence; X₁ is A, X₄ is F in said CDR-H3; and/or X₁ is A in said CDR-L3 sequence is additionally present in the CDRs. As previously stated herein above, a preferred amino acid for X₂ is I in said CDR-H1 sequence or X₂ is G in said CDR-H2 sequence, if only one additional amino acid is present in the CDRs, wherein it is most preferred that X₂ is I in said CDR-H1 sequence. A preferred combination of two of said additional amino acids is X₂ is I in said CDR-H1 sequence and X₄ is F in said CDR-H3 sequence; or X₂ is G in said CDR-H2 sequence and X₄ is F in said CDR-H3 sequence. A preferred combination of three of said additional amino acids is X₂ is I in said CDR-H1 sequence, X, is A, and X₄ is F in said CDR-H3 sequence; or X₂ is I in said CDR-H1 sequence, X₄ is F in said CDR-H3 sequence, and X, is A in said CDR-L3 sequence. Since the latter amino acids are to be present additionally, it is understood that those recited additional amino acids that overlap in position with the amino acid substitution of iii) cannot replace the overlapping amino acid substitution. For example, if the only amino acid substitution in accordance with iii) is either X₂4V or X₂4F in CDR-H1, said amino acid cannot be replaced by amino acid I in said CDR-H1 sequence, since there would be no amino acid substitution as defined in iii) remaining in the binding domain. In other terms, there must always be at least one of the amino acid substitutions as defined in iii) comprised in the polypeptide or polypeptide construct of the invention.

[0106] It is also understood that depending on the actual sequence of the CDRs, one or more of said additional amino acids may already be part of the CDRs as defined herein above or, if this is not the case, those CDRs will be changed to exhibit said additional amino acid(s) in combination with one amino acid substitution or a combination thereof as recited in iii).

[0107] In another preferred embodiment, the polypeptide or polypeptide construct of the invention comprises or consists of combinations of said amino acid substitutions as defined in iii) of two, three, four, five, six, seven, eight, nine, ten, eleven, twelve or more amino acid substitutions, or of up to two, three, four, five, six, seven, eight, nine, ten, eleven, twelve amino acid substitutions. Preferably, only the substitution(s) defined herein are introduced in the VH and the VL region sequence. This applies to all embodiments recited herein so that the VH and the VL region sequence consists of the unmodified amino acid sequence with the substitution(s) as defined herein.

[0108] More specifically, it is preferred that i) said one amino acid substitution is selected from: a. X₂4V or X₂4F in CDR-H1; H1A in CDR-H3; and b. X₁1L and W3Y in CDR-L3; ii) said combination of two or more amino acid substitutions are selected from X₁16A in CDR-H2 and N6S in CDR-H3; and X₁16A in CDR-H2 and N6T in CDR-H3; iii) said combination of three or more amino acid substitutions are selected from X₁16A in CDR-H2, H1A and N6S in CDR-H3; X₁16A in CDR-H2, H1A and N6T in CDR-H3; X₁16A in CDR-H2, H1N and N6T in CDR-H3; iv) said combination of four or more amino acid substitutions are selected from X₁16A in CDR-H2, H1A, N6S in CDR-H3, and W3Y in CDR-L3; D15E, X₁16A in CDR-H2, H1A, and N6T in CDR-H3; D15E, X₁16A in CDR-H2, H1A, and N6S in CDR-H3; X₁16A in CDR-H2, H1A, F41 and N6S in CDR-H3; v) said combination of five or six amino acid substitutions are selected from X₁16A in CDR-H2, H1A, X₁2E, F41, and N6T in CDR-H3; X₁16A in CDR-H2, H1N, X₁2E, F41, and N6S in CDR-H3; D15E, X₁16A in CDR-H2, H1A, N6S in CDR-H3; and W3Y in CDR-L3; D15E, X₁16A in CDR-H2, H1N, X₁2E, F41 and N6T in CDR-H3; D15E, X₁16A in CDR-H2, H1A, X₁2E, F41 and N6T in CDR-H3; D15E, X₁16A in CDR-H2, X₁2E, F41 and N6T in CDR-H3.

[0109] In accordance with the foregoing, the amino acid substitution H1A in CDR-H3 is preferably the amino acid substitution, in case there is only one amino acid substitution in the CD3epsilon binding domain, within the CDR sequences or the VH region sequences as defined herein. Furthermore, in case of combinations of amino acid substitutions as defined in iii) preferably H1A in CDR-H3 is one of the amino acid substitutions of said combination.

[0110] In an embodiment, the invention relates to a polypeptide or polypeptide construct comprising: a binding domain binding to an extracellular epitope of the human CD3ε chain comprising or consisting of a VH region and a VL region, wherein
[0111] i) the VH region comprises the sequence of EVX₁LX₂ESGGGLX₃QPX₄GSLKLSCAASGFTFNX₅YAX₆NWVRQAPGKGLEWVA RIRSKYNNYATYYADX₇VKX₃RFTISRDDSXX₁₀X₁₁X₁₂YLQMNNLKTEDTAX₁₃YYC VRHX₁₄NFGNSYX₁₅SX₁₆X₁₇AYWGQGTLVTVSX₁₈, where X₁ is Q or K; X₂ is V or L; X₃ is V or E; X₄ is G or K; X₅ is K, V, S, G, R, T, or I; X₆ is M or I; X₇ is S or Q; X₈ is D, G, K, S, or E; X₉ is K or Q; X₁₀ is N or S; X₁₁ is T or 1; X₁₂ is A or L; X₁₃ is V or M; X₁₄ is G, R or A; X₁₅ is I, L, V, or T; X₁₆ is Y, W or F; X₁₇ is W, F or Y; and X₁₈ is S or A; and
[0112] ii) the VL region comprises the sequence of QX₁VVTQEX₂X₃LTX₄SPGX₅TVTLTCX₆SSTGAVTX₇X₈X₉YX₁₀NWVQX₁ KPX₁₂X₁₃ X₁₄X₁₅X₁₆GLIGX₁₇TX₁₈X₁₉X₂₀X₂₁X₂₂GX₂₃PARFSGSLX₂₄GX₂₅KAALTX₂₆X₂₇GX₂₈QX₂₉EDEAX₃₀YX₃₁CX₃₂LWYSNX₃₃WVFGGGTKLTVL, where X₁ is T or A; X₂ is P or S; X₃ is S or A; X₄ is V or T; X₅ is G or E; X₆ is G, R, or A; X₇ is S or T; X₈ is G or S; X₉ is N or Y; X₁₀ is P or A; X₁₁ is Q or E; X₁₂ is G or D; X₁₃ is Q or H; X₁₄ is A or L; X₁₅ is P or F; X₁ is R or T; X₁₇ is G or A; X₁₈ is K or D; X₁₉ is F or M; X₂₀ is L or R; X₂₁ is A, P or V; X₂₂ is P or S; X₂₃ is Tor V; X₂₄ is L or 1; X₂₅ is G or D; X₂₆ is L or 1; X₂₇ is S or T; X₂₈ is V or A; X₂₉ is P or T; X₃₀ is E or I; X₃₁ is Y or F; X₃₂ is V, A, or T; X₃₃ is R or L; and
[0113] iii) wherein the VH and/or VL region sequence comprises one or more amino acid substitutions selected from
   [0114] a. N30 (preferably S), X₆34V, X₆34F, Q39 (E, K, R, D, preferably E), L45 (M or V, preferably M), D64 (preferably E), X₇65A, X₁₂81V, X₁₂81T, X₁₂811, V99 (A or L, preferably A), H101 (preferably A or N), X₁₄102E, F104 (preferably I), and N106 (preferably S or T) in the VH region sequence in i); and
   [0115] b. L20 (preferably I or M), V38 (preferably I), X₁₁40R, X₁₁40K, X₂₄69 (S or E, preferably S), X₃₂91L, X₃₃93 (preferably Y), and G102 (preferably S) in the VL region sequence in ii).

[0116] In this embodiment, preferred VH and VL region sequences comprised in the binding domain and mediating the binding to the human CD3ε chain are described. As evident from the above, the VH and VL region sequences of i) and ii) comprise various placeholders, wherein the same hierarchy and nomenclature applies for the placeholders as recited herein above in the context of the CDRs comprised in said VH and VL region of i) and ii). As is evident from the sequences for the VH and VL region, said CDRs described herein above are part of said VH and VL region sequence. Accordingly, the preferred embodiments of said CDRs of i) and ii) as described herein above also apply to this preferred embodiment.

[0117] The VH region of i) comprises or consists of the sequence of EVX₁LX₂ESGGGLX₃QPX₄GSLKLSCAASGFTFNX₅YAX₆NWVRQAPGKGLEWVARIRSKYNN YATYYADX₇VKX₈RFTISRDDSX₉X₁₀X₁₁X₁₂YLQMNNLKTEDTAX₁₃YYCVRHX₁₄NFGNSYX₁₅S X₁₆X₁₇AYWGQGTLVTVSX₁₈, where X₁ is Q or K; X₂ is V or L; X₃ is V or E; X₄ is G or K; X₅ is K, V, S, G, R, T, or I; X₆ is M or I; X₇ is S or Q; X₈ is D, G, K, S, or E; X₉ is K or Q; X₁₀ is N or S; X₁₁ is T or 1; X₁₂ is A or L; X₁₃ is V or M; X₁₄ is G, R or A; X₁₅ is 1, L, V, or T; X₁₆ is Y, W or F; X₁₇ is W, F or Y; and X₁₈ is S or A.

[0118] The CDR sequences within said VH region are as follows: a CDR-H1 sequence comprising or consisting of X₅YAX₆N; a CDR-H2 sequence comprising or consisting of RIRSKYNNYATYYADX₇VKX₈; and a CDR-H3 sequence comprising or consisting of HX₁₄NFGNSYX₁₅SX₁₆X₁₇AY. Preferred examples of said CDR-H1 sequence X₅YAX₆N are selected from KYAMN, VYAMN, SYAMN, GYAMN, RYAMN, TYAMN, IYAMN, and KYAIN, wherein KYAMN or KYAIN is most preferred. Preferred examples of said CDR-H2 sequence RIRSKYNNYATYYADX₇VKX₈ are selected from RIRSKYNNYATYYADSVKD, RIRSKYNNYATYYADSVKK, RIRSKYNNYATYYADSVKS, RIRSKYNNYATYYADSVKE, RIRSKYNNYATYYADSVKG, and RIRSKYNNYATYYADQVKD, wherein RIRSKYNNYATYYADSVKD is most preferred. Preferred examples of said CDR-H3 sequence HX₁₄NFGNSYX₁₅SX₁₆X₁₇AY are selected from HGNFGNSYISYWAY, HGNFGNSYLSWWAY, HGNFGNSYTSYYAY, HRNFGNSYLSWFAY, HGNFGNSYVSFFAY, HGNFGNSYISWWAY, HGNFGNSYVSWWAY, HGNFGNSYLSYFAY, HGNFGNSYLSFWAY, HANFGNSYISYWAY, and HGNFGNSYVSWFAY, wherein HGNFGNSYISYWAY is most preferred.

[0119] For X₁, the amino acid Q is preferred. For X₂, the amino acid V is preferred. For X₃, the amino acid V is preferred. For X₄, the amino acid G is preferred. For X₅, the amino acid K is most preferred, and for X₆, the amino acid M is most preferred. A preferred combination for X₅ and X₆ is M for X₆ in combination with any of the amino acid residues of X₅, such as the combinations for X₅ and X₆, respectively, selected from K and M, V and M, S and M, most preferred the combination K and M. Another preferred combination is K and I, for X₅ and X₆, respectively. Preferred examples of said CDR-H1 sequence X₅YAX₆N are selected from KYAMN, VYAMN, SYAMN, GYAMN, RYAMN, TYAMN, IYAMN, and KYAIN, wherein KYAMN or KYAIN is most preferred. For X₇, the amino acid S is most preferred, and for X₈, the amino acid D is most preferred. A preferred combination is S for X₇ in combination with any of the amino acid residues of X₈, such as the combinations for X₇ and X₈, respectively, selected from S and D, S and G, S and K, S and S, most preferred the combination S and D. Preferred examples of said CDR-H2 sequence RIRSKYNNYATYYADX₇VKX₈ are selected from RIRSKYNNYATYYADSVKD, RIRSKYNNYATYYADSVKK, RIRSKYNNYATYYADSVKS, RIRSKYNNYATYYADSVKE, RIRSKYNNYATYYADSVKG, and RIRSKYNNYATYYADQVKD, wherein RIRSKYNNYATYYADSVKD is most preferred. For X₉, the amino acid K is preferred. For X₁₀, the amino acid N is preferred. For X₁₁, the amino acid T is preferred. For X₁₂, the amino acid A is preferred. For X₁₃, the amino acid V is preferred. For X₁₄, the amino acid G is most preferred; for X₁₅, the amino acid I is most preferred; for X₁₆, the amino acid Y is most preferred; and for X₁₇, the amino acid W is most preferred. Preferred examples of said CDR-H3 sequence HX₁₄NFGNSYX₁₅SX₁₆X₁₇AY are selected from HGNFGNSYISYWAY, HGNFGNSYLSWWAY, HGNFGNSYTSYYAY, HRNFGNSYLSWFAY, HGNFGNSYVSFFAY, HGNFGNSYISWWAY, HGNFGNSYVSWWAY, HGNFGNSYLSYFAY, HGNFGNSYLSFWAY, HANFGNSYISYWAY, and HGNFGNSYVSWFAY, wherein HGNFGNSYISYWAY is most preferred. For X₁₈, the amino acid sequence S is preferred.

[0120] The VL region of ii) comprises or consists of the sequence of QX₁VVTQEX₂X₃LTX₄SPGX₅TVTLTCX₆SSTGAVTX₇X₈X₉YX₁₀NWVQX₁ KPX₁₂X₁₃X₁₄X₁₅X₁₆GL IGX₁₇TX₁₈X₁₉X₂₀X₂₁X₂₂GX₂₃PARFSGSLX₂₄GX₂₅KAALTX₂₆X₂₇GX₂₈QX₂₉EDEAX₃₀YX₃₁CX₃₂LW YSNX₃₃WVFGGGTKLTVL, where X₁ is T or A; X₂ is P or S; X₃ is S or A; X₄ is V or T; X₅ is G or E; X₆ is G, R, or A; X₇ is S or T; X₈ is G or S; X₉ is N or Y; X₁₀ is P or A; X₁₁ is Q or E; X₁₂ is G or D; X₁₃ is Q or H; X₁₄ is A or L; X₁₅ is P or F; X₁₆ is R or T; X₁₇ is G or A; X₁₈ is K or D; X₁₉ is F or M; X₂₀ is L or R; X₂₁ is A, P or V; X₂₂ is P or S; X₂₃ is T or V; X₂₄ is L or I; X₂₅ is G or D; X₂₆ is L or I; X₂₇ is S or T; X₂₈ is V or A; X₂₉ is P or T; X₃₀ is E or I; X₃₁ is Y or F; X₃₂ is V, A, or T; and X₃₃ is R or L.

[0121] The CDR sequences within said VL region are as follows: a CDR-L1 sequence comprising or consisting of X₆SSTGAVTX₇X₈X₉YX₁₀N; a CDR-L2 sequence comprising or consisting of X₁₇TX₁₈X₁₉X₂₀X₂₁X₂₂; and a CDR-L3 sequence comprising or consisting of X₃₂LWYSNX₃₃WV. Preferred examples of the CDR-L1 sequence are selected from GSSTGAVTSGNYPN, RSSTGAVTSGYYPN, GSSTGAVTSGYYPN, ASSTGAVTSGNYPN, and RSSTGAVTTSNYAN, wherein GSSTGAVTSGNYPN is most preferred. Preferred examples of the CDR-L2 sequence are selected from GTKFLAP, ATDMRPS, GTKFLVP, and GTNKRAP, wherein GTKFLAP is most preferred. Preferred examples of the CDR-L3 sequence are selected from VLWYSNRWV, ALWYSNRWV, TLWYSNRWV, and ALWYSNLWV, wherein VLWYSNRWV is most preferred.

[0122] For X₁, the amino acid T is preferred. For X₂, the amino acid P is preferred. For X₃, the amino acid S is preferred. For X₄, the amino acid V is preferred. For X₅, the amino acid G is preferred. For X₆, the amino acid G is most preferred. For X₇, the amino acid S is most preferred. For X₈, the amino acid G is most preferred. For X₉, the amino acid N is most preferred. For X₁₀, the amino acid P is most preferred. X₆ to X₁₀ are part of the CDR-L1 sequence within the VL region. Preferred examples of said CDR-L1 sequence are selected from GSSTGAVTSGNYPN, RSSTGAVTSGYYPN, GSSTGAVTSGYYPN, ASSTGAVTSGNYPN, and RSSTGAVTTSNYAN, wherein GSSTGAVTSGNYPN is most preferred. For X₁₁, the amino acid Q is preferred. For X₁₂, the amino acid G is preferred. For X₁₃, the amino acid Q is preferred. For X₁₄, the amino acid A is preferred. For X₁₅, the amino acid P is preferred. For X₁₆, the amino acid R is preferred. For X₁₇, the amino acid G is preferred. For X₁₈, the amino acid K is preferred. For X₁₉, the amino acid F is preferred. For X₂₀, the amino acid L is preferred. For X₂₁, the amino acid A is preferred. For X₂₂, the amino acid P is preferred. X₁₇ to X₂₂ are part of the CDR-L2 sequence of the VL region. Preferred examples of said CDR-L2 sequence are selected from GTKFLAP, ATDMRPS, GTKFLVP, and GTNKRAP, wherein GTKFLAP is most preferred. For X₂₃, the amino acid T is preferred. For X₂₄, the amino acid L is preferred. For X₂₅, the amino acid G is preferred. For X₂₆, the amino acid L is preferred. For X₂₇, the amino acid S is preferred. For X₂₈, the amino acid V is preferred. For X₂₉, the amino acid P is preferred. For X₃₀, the amino acid E is preferred. For X₃₁, the amino acid Y is preferred. For X₃₂, the amino acid V is preferred. For X₃₃, the amino acid R is preferred. X₃₂ and X₃₃ are part of the CDR-L3 sequence of the VL region. Preferred examples of said CDR-L3 sequence are selected from VLWYSNRWV, ALWYSNRWV, TLWYSNRWV, and ALWYSNLWV, wherein VLWYSNRWV is most preferred.

[0123] In a more preferred embodiment, the VH region of i) comprises or consists of the sequence of EVQLVESGGGLX₁QPGGSLKLSCAASGFTFNX₂YAX₃NWVRQAPGKGLEWVARIRSKYNNY ATYYADX₄VKX₅RFTISRDDSKNTAYLQMNNLKTEDTAVYYCVRHX₆NFGNSYX₇SX₈X₉AYW GQGTLVTVSS, where X₁ is V or E; X₂ is K, V, S, G, R, or I; X₃ is M or I; X₄ is S or Q; X₅ is D, G, K, S, or E; X₆ is G, R or A; X₇ is I, L, V, or T; X₈ is Y, W or F; and X₉ is W or F; and the VL region of ii) comprises or consists of the sequence of QTVVTQEPSLTVSPGGTVTLTCX₁SSTGAVTSGX₂YPNWVQQKPGQAPRGLIGX₃TX₄X₅X₆X₇ X₃GTPARFSGSLLGGKAALTLSGVQPEDEAEYYCX₉LWYSNRWVFGGGTKLTVL, where X, is G, R, or A; X₂ is N or Y; X₃ is G or A; X₄ is K or D; X₅ is F or M; X₆ is L or R; X₇ is A, P or V; X₈ is P or S; and X₉ is V, A, or T.

[0124] The VH region of i) comprises or consists of the sequence of EVQLVESGGGLX₁QPGGSLKLSCAASGFTFNX₂YAX₃NWVRQAPGKGLEWVARIRSKYNNY ATYYADX₄VKX₅RFTISRDDSKNTAYLQMNNLKTEDTAVYYCVRHX₆NFGNSYX₇SX₈X₉AYW GQGTLVTVSS, where X, is V or E; X₂ is K, V, S, G, R, or I; X₃ is M or I; X₄ is S or Q; X₅ is D, G, K, S, or E; X₆ is G, R or A; X₇ is I, L, V, or T; X₈ is Y, W or F; and X₉ is W or F.

[0125] The CDR sequences within said VH region are as follows: a CDR-H1 sequence comprising or consisting of X₂YAX₃N; a CDR-H2 sequence comprising or consisting of RIRSKYNNYATYYADX₄VKX₅; and a CDR-H3 sequence comprising or consisting of HX₆NFGNSYX₇SX₃X₉AY. Preferred examples of said CDR-H1 sequence X₂YAX₃N are selected from KYAMN, VYAMN, SYAMN, GYAMN, RYAMN, TYAMN, IYAMN, and KYAIN, wherein KYAMN or KYAIN is more preferred, wherein KYAMN is most preferred. Preferred examples of said CDR-H2 sequence RIRSKYNNYATYYADX₄VKX₅ are selected from RIRSKYNNYATYYADSVKD, RIRSKYNNYATYYADSVKK, RIRSKYNNYATYYADSVKS, RIRSKYNNYATYYADSVKE, RIRSKYNNYATYYADSVKG, and RIRSKYNNYATYYADQVKD, wherein RIRSKYNNYATYYADSVKD or RIRSKYNNYATYYADQVKD is more preferred, wherein RIRSKYNNYATYYADSVKD is most preferred. Preferred examples of said CDR-H3 sequence HX₆NFGNSYX₇SX₃X₉AY are selected from HGNFGNSYISYWAY, HGNFGNSYLSWWAY, HGNFGNSYTSYYAY, HRNFGNSYLSWFAY, HGNFGNSYVSFFAY, HGNFGNSYISWWAY, HGNFGNSYVSWWAY, HGNFGNSYLSYFAY, HGNFGNSYLSFWAY, HANFGNSYISYWAY, and HGNFGNSYVSWFAY, wherein HGNFGNSYISYWAY is most preferred.

[0126] For X₁, the amino acid V is preferred. For X₂, the amino acid K is most preferred, and for X₃, the amino acid M is most preferred. A preferred combination for X₂ and X₃ is M for X₃ in combination with any of the amino acid residues of X₂, such as the combinations for X₂ and X₃, respectively, selected from K and M, V and M, S and M, most preferred the combination K and M. Another preferred combination is K and I, for X₂ and X₃, respectively. Preferred examples of said CDR-H1 sequence X₂YAX₃N are selected from KYAMN, VYAMN, SYAMN, GYAMN, RYAMN, TYAMN, IYAMN, and KYAIN, wherein KYAMN or KYAIN is more preferred, wherein KYAMN is most preferred. For X₄, the amino acid S is preferred. For X₅, the amino acid D is most preferred. A preferred combination is S for X₄ in combination with any of the amino acid residues of X₅, such as the combinations for X₄ and X₅, respectively, selected from S and D, S and G, S and K, S and S, most preferred the combination S and D. Preferred examples of said CDR-H2 sequence RIRSKYNNYATYYADX₄VKX₅ are selected from RIRSKYNNYATYYADSVKD, RIRSKYNNYATYYADSVKK, RIRSKYNNYATYYADSVKS, RIRSKYNNYATYYADSVKE, RIRSKYNNYATYYADSVKG, and RIRSKYNNYATYYADQVKD, wherein RIRSKYNNYATYYADSVKD or RIRSKYNNYATYYADQVKD is more preferred, wherein RIRSKYNNYATYYADSVKD is most preferred. For X₆, the amino acid G is most preferred; for X₇, the amino acid I is most preferred; for X₈, the amino acid Y is most preferred; and for X₉, the amino acid W is most preferred. Preferred examples of said CDR-H3 sequence HX₆NFGNSYX₇SX₈X₉AY are selected from HGNFGNSYISYWAY, HGNFGNSYLSWWAY, HGNFGNSYTSYYAY, HRNFGNSYLSWFAY, HGNFGNSYVSFFAY, HGNFGNSYISWWAY, HGNFGNSYVSWWAY, HGNFGNSYLSYFAY, HGNFGNSYLSFWAY, HANFGNSYISYWAY, and HGNFGNSYVSWFAY, wherein HGNFGNSYISYWAY is most preferred.

[0127] The VL region of ii) comprises or consists of the sequence of QTVVTQEPSLTVSPGGTVTLTCX₁SSTGAVTSGX₂YPNWVQQKPGQAPRGLIGX₃TX₄X₅X₆X₇ X₈GTPARFSGSLLGGKAALTLSGVQPEDEAEYYCX₉LWYSNRWVFGGGTKLTVL, where X, is G, R, or A; X₂ is N or Y; X₃ is G or A; X₄ is K or D; X₅ is F or M; X₆ is L or R; X₇ is A, P or V; X₈ is P or S; and X₉ is V, A, or T.

[0128] The CDR sequences within said VL region are as follows: a CDR-L1 sequence comprising or consisting of X₁SSTGAVTSGX₂YPN; a CDR-L2 sequence comprising or consisting of X₃TX₄X₅X₆X₇X₈; and a CDR-L3 sequence comprising or consisting of X₉LWYSNRWV. Preferred examples of the CDR-L1 sequence are selected from GSSTGAVTSGNYPN, RSSTGAVTSGYYPN, GSSTGAVTSGYYPN, ASSTGAVTSGNYPN, and RSSTGAVTTSNYAN, wherein GSSTGAVTSGNYPN is most preferred. Preferred examples of the CDR-L2 sequence are selected from GTKFLAP, ATDMRPS, GTKFLVP, and GTNKRAP, wherein GTKFLAP is most preferred. Preferred examples of the CDR-L3 sequence are selected from VLWYSNRWV, ALWYSNRWV, TLWYSNRWV, and ALWYSNLWV, wherein VLWYSNRWV is most preferred.

[0129] For X₁, the amino acid G is most preferred. For X₂, the amino acid N is preferred. X₁ and X₂ are part of the CDR-L1 sequence X₁SSTGAVTSGX₂YPN within the VL region. Preferred examples of said CDR-L1 sequence are selected from GSSTGAVTSGNYPN, RSSTGAVTSGYYPN, GSSTGAVTSGYYPN, ASSTGAVTSGNYPN, and RSSTGAVTTSNYAN, wherein GSSTGAVTSGNYPN is most preferred. For X₃, the amino acid G is preferred. For X₄, the amino acid K is preferred. For X₅, the amino acid F is preferred. For X₆, the amino acid L is preferred. For X₇, the amino acid A is most preferred. For X₈, the amino acid P is preferred. X₃ to X₈ are part of the CDR-L2 sequence X₃TX₄X₅X₆X₇X₈ of the VL region. Preferred examples of said CDR-L2 sequence are selected from GTKFLAP, ATDMRPS, GTKFLVP, and GTNKRAP, wherein GTKFLAP is most preferred. For X₉, the amino acid V is most preferred. X₉ is part of the CDR-L3 sequence X_{L}LWYSNRWV of the VL region. Preferred examples of said CDR-L3 sequence are selected from VLWYSNRWV, ALWYSNRWV, TLWYSNRWV, and ALWYSNLWV, wherein VLWYSNRWV is most preferred.

[0130] In another preferred embodiment, the VH region of ii) comprises or consists of the sequence of EVQLVESGGGLX₁QPGGSLKLSCAASGFTFNX₂YAX₃NWVRQAPGKGLEWVARIRSKYNNY ATYYADX₄VKX₅RFTISRDDSKNTAYLQMNNLKTEDTAVYYCVRHX₆NFGNSYX₇SX₃X₉AYW GQGTLVTVSS, where X, is V or E; X₂ is K, V, S, R, or I; X₃ is M or I; X₄ is S or Q; X₅ is D, G, K or S; X₆ is G or A; X₇ is I, L, V, or T; X₈ is Y, W or F; and X₉ is W or F; and the VL region of ii) comprises or consists of the sequence of QTVVTQEPSLTVSPGGTVTLTCX₁SSTGAVTSGX₂YPNWVQQKPGQAPRGLIGGTKFLX₃PG TPARFSGSLLGGKAALTLSGVQPEDEAEYYCX₄LWYSNRWVFGGGTKLTVL, where X, is G or A; X₂ is N or Y; X₃ is A or V; and X₄ is V, A, or T.

[0131] The VH region of ii) comprises or consists of the sequence of EVQLVESGGGLX₁QPGGSLKLSCAASGFTFNX₂YAX₃NWVRQAPGKGLEWVARIRSKYNNY ATYYADX₄VKX₅RFTISRDDSKNTAYLQMNNLKTEDTAVYYCVRHX₆NFGNSYX₇SX₃X₉AYW GQGTLVTVSS, where X, is V or E; X₂ is K, V, S, R, or I; X₃ is M or I; X₄ is S or Q; X₅ is D, G, K or S; X₆ is G or A; X₇ is I, L, V, or T; X₈ is Y, W or F; and X₉ is W or F.

[0132] The CDR sequences within said VH region are as follows: a CDR-H1 sequence comprising or consisting of X₂YAX₃N; a CDR-H2 sequence comprising or consisting of RIRSKYNNYATYYADX₄VKX₅; and a CDR-H3 sequence comprising or consisting of HX₆NFGNSYX₇SX₃X₉AY. Preferred examples of said CDR-H1 sequence X₂YAX₃N are selected from KYAMN, VYAMN, SYAMN, RYAMN, IYAMN, and KYAIN, wherein KYAMN or KYAIN are more preferred, wherein KYAMN is most preferred. Preferred examples of said CDR-H2 sequence RIRSKYNNYATYYADX₄VKX₅ are selected from RIRSKYNNYATYYADSVKD, RIRSKYNNYATYYADSVKK, RIRSKYNNYATYYADSVKS, RIRSKYNNYATYYADSVKG, and RIRSKYNNYATYYADQVKD, wherein RIRSKYNNYATYYADSVKD or RIRSKYNNYATYYADQVKD are more preferred, wherein RIRSKYNNYATYYADSVKD is most preferred. Preferred examples of said CDR-H3 sequence HX₆NFGNSYX₇SX₃X₉AY are selected from HGNFGNSYISYWAY, HGNFGNSYLSWWAY, HGNFGNSYTSYYAY, HRNFGNSYLSWFAY, HGNFGNSYVSFFAY, HGNFGNSYISWWAY, HGNFGNSYVSWWAY, HGNFGNSYLSYFAY, HGNFGNSYLSFWAY, HANFGNSYISYWAY, and HGNFGNSYVSWFAY, wherein HGNFGNSYISYWAY or HANFGNSYISYWAY are more preferred, wherein HGNFGNSYISYWAY is most preferred.

[0133] For X₁, the amino acid V is preferred. For X₂, the amino acid K is most preferred, and for X₃, the amino acid M is most preferred. A preferred combination for X₂ and X₃ is M for X₃ in combination with any of the amino acid residues of X₂, such as the combinations for X₂ and X₃, respectively, selected from K and M, V and M, S and M, most preferred the combination K and M. Another preferred combination is K and I, for X₂ and X₃, respectively. Preferred examples of said CDR-H1 sequence X₂YAX₃N are selected from KYAMN, VYAMN, SYAMN, RYAMN, IYAMN, and KYAIN, wherein KYAMN or KYAIN are more preferred, wherein KYAMN is most preferred. For X₄, the amino acid S is preferred. For X₅, the amino acid D is most preferred. A preferred combination is S for X₄ in combination with any of the amino acid residues of X₅, such as the combinations for X₄ and X₅, respectively, selected from S and D, S and G, S and K, S and S, most preferred the combination S and D. Preferred examples of said CDR-H2 sequence RIRSKYNNYATYYADX₄VKX₅ are selected from RIRSKYNNYATYYADSVKD, RIRSKYNNYATYYADSVKK, RIRSKYNNYATYYADSVKS, RIRSKYNNYATYYADSVKG, and RIRSKYNNYATYYADQVKD, wherein RIRSKYNNYATYYADSVKD or RIRSKYNNYATYYADQVKD are more preferred, wherein RIRSKYNNYATYYADSVKD is most preferred are selected from RIRSKYNNYATYYADSVKD, RIRSKYNNYATYYADSVKK, RIRSKYNNYATYYADSVKS, RIRSKYNNYATYYADSVKE, RIRSKYNNYATYYADSVKG, and RIRSKYNNYATYYADQVKD, wherein RIRSKYNNYATYYADSVKD is most preferred. For X₈, the amino acid G is most preferred; for X₇, the amino acid I is most preferred; for X₈, the amino acid Y is most preferred; and for X₉, the amino acid W is most preferred. Preferred examples of said CDR-H3 sequence HX₆NFGNSYX₇SX₈X₉AY are selected from HGNFGNSYISYWAY, HGNFGNSYLSWWAY, HGNFGNSYTSYYAY, HRNFGNSYLSWFAY, HGNFGNSYVSFFAY, HGNFGNSYISWWAY, HGNFGNSYVSWWAY, HGNFGNSYLSYFAY, HGNFGNSYLSFWAY, HANFGNSYISYWAY, and HGNFGNSYVSWFAY, wherein HGNFGNSYISYWAY is most preferred.

[0134] The VL region of ii) comprises or consists of the sequence of QTVVTQEPSLTVSPGGTVTLTCX₁SSTGAVTSGX₂YPNWVQQKPGQAPRGLIGGTKFLX₃PG TPARFSGSLLGGKAALTLSGVQPEDEAEYYCX₄LWYSNRWVFGGGTKLTVL, where X, is G or A; X₂ is N or Y; X₃ is A or V; and X₄ is V, A, or T.

[0135] The CDR sequences within said VL region are as follows: a CDR-L1 sequence comprising or consisting of X₁SSTGAVTSGX₂YPN; a CDR-L2 sequence comprising or consisting of GTKFLX₃P; and a CDR-L3 sequence comprising or consisting of X₄LWYSNRWV. Preferred examples of the CDR-L1 sequence are selected from GSSTGAVTSGNYPN, RSSTGAVTSGYYPN, GSSTGAVTSGYYPN, ASSTGAVTSGNYPN, and RSSTGAVTTSNYAN, wherein GSSTGAVTSGNYPN is most preferred. Preferred examples of the CDR-L2 sequence are selected from GTKFLAP, ATDMRPS, GTKFLVP, and GTNKRAP, wherein GTKFLAP is most preferred. Preferred examples of the CDR-L3 sequence are selected from VLWYSNRWV, ALWYSNRWV, TLWYSNRWV, and ALWYSNLWV, wherein VLWYSNRWV is most preferred.

[0136] For X₁, the amino acid G is preferred. For X₂, the amino acid N is preferred. X₁ and X₂ are part of the CDR-L1 sequence X₁SSTGAVTSGX₂YPN within the VL region. Preferred examples of said CDR-L1 sequence are selected from GSSTGAVTSGNYPN, RSSTGAVTSGYYPN, GSSTGAVTSGYYPN, ASSTGAVTSGNYPN, and RSSTGAVTTSNYAN, wherein GSSTGAVTSGNYPN is most preferred. X₃ is part of the CDR-L2 sequence GTKFLX₃P of the VL region. Said CDR-L2 sequence can either be GTKFLAP or GTKFLVP, wherein GTKFLAP is preferred. For X₃, the amino acid A is preferred. X₄ is part of the CDR-L3 sequence X₄LWYSNRWV of the VL region. Preferred examples of said CDR-L3 sequence are selected from VLWYSNRWV, ALWYSNRWV, and TLWYSNRWV, wherein VLWYSNRWV is most preferred. For X₄, the amino acid V is most preferred.

[0137] In a further preferred embodiment, the VH region of i) comprises or consists of the sequence of EVQLVESGGGLVQPGGSLKLSCAASGFTFNX₁YAMNWVRQAPGKGLEWVARIRSKYNNYA TYYADSVKX₂RFTISRDDSKNTAYLQMNNLKTEDTAVYYCVRHGNFGNSYX₃SX₄WAYWGQ GTLVTVSS, where X, is K or S; X₂ is D or G; X₃ is I or V; and X₄ is Y or W; and the VL region of ii) comprises or consists of the sequence of QTVVTQEPSLTVSPGGTVTLTCGSSTGAVTSGX₁YPNWVQQKPGQAPRGLIGGTKFLAPGT PARFSGSLLGGKAALTLSGVQPEDEAEYYCX₂LWYSNRWVFGGGTKLTVL, where X, is N or Y; and X₂ is V or A.

[0138] The VH region of i) comprises or consists of the sequence of EVQLVESGGGLVQPGGSLKLSCAASGFTFNX₁YAMNWVRQAPGKGLEWVARIRSKYNNYA TYYADSVKX₂RFTISRDDSKNTAYLQMNNLKTEDTAVYYCVRHGNFGNSYX₃SX₄WAYWGQ GTLVTVSS, where X, is K or S, wherein K is preferred; X₂ is D or G, wherein D is preferred; X₃ is I or V, wherein I is preferred; and X₄ is Y or W, wherein Y is preferred.

[0139] The CDR sequences within said VH region are as follows: a CDR-H1 sequence comprising or consisting of X₁YAMN; a CDR-H2 sequence comprising or consisting of RIRSKYNNYATYYADSVKX₂; and a CDR-H3 sequence comprising or consisting of HGNFGNSYX₃SX₄WAY. Said CDR-H1 sequence X₁YAMN is selected from KYAMN or SYAMN, wherein KYAMN is preferred. Preferred examples of said CDR-H2 sequence RIRSKYNNYATYYADSVKX₂ are selected from RIRSKYNNYATYYADSVKD and RIRSKYNNYATYYADSVKG, wherein RIRSKYNNYATYYADSVKD is preferred. Said CDR-H3 sequence HGNFGNSYX₃SX₄WAY is HGNFGNSYISYWAY or HGNFGNSYVSWWAY, wherein HGNFGNSYISYWAY is preferred.

[0140] The VL region of ii) comprises or consists of the sequence of QTVVTQEPSLTVSPGGTVTLTCGSSTGAVTSGX₁YPNWVQQKPGQAPRGLIGGTKFLAPGT PARFSGSLLGGKAALTLSGVQPEDEAEYYCX₂LWYSNRWVFGGGTKLTVL, where X, is N or Y, wherein N preferred; and X₂ is V or A, wherein V preferred.

[0141] The CDR sequences within said VL region are as follows: a CDR-L1 sequence comprising or consisting of GSSTGAVTSGX₁YPN; a CDR-L2 sequence comprising or consisting of GTKFLAP; and a CDR-L3 sequence comprising or consisting of X₂LWYSNRWV. The CDR-L1 sequence is GSSTGAVTSGNYPN or GSSTGAVTSGYYPN, wherein GSSTGAVTSGNYPN is preferred. The CDR-L3 sequence is VLWYSNRWV or ALWYSNRWV, wherein VLWYSNRWV is preferred.

[0142] In a preferred embodiment, the VH region of i) comprises or consists of the sequence as defined in SEQ ID NOs: 124, 172, 362, 552, 730, 928, 1106, 1296, 1474, 1664 or 1854; and the VL region of ii) comprises or consists of the sequence of as defined in SEQ ID NOs: 125, 173, 363, 553, 731, 929, 1107, 1297, 1475, 1665, or 1855. Preferred combinations of VH and VL regions of i) and ii) are defined in SEQ ID NOs: 124 and 125 (combination of binder termed “2B2”), 172 and 173 (“A2J”), 362 and 363 (“E1L”), 552 and 553 (“E2M”), 730 and 731 (“F12Q”), 928 and 929 (“F6A”), 1106 and 1107 (“F70”), 1296 and 1297 (“G4H”), 1474 and 1475 (“H1E”), 1664 and 1665 (“H2C”), or 1854 and 1855 (“I2C”). Preferred is that the CD3epsilon binding domain comprises or consists of a combination of VH and VL region of i) and ii) selected from the group consisting of SEQ ID NOs: 124 and 125, 172 and 173, 362 and 363, 552 and 553, 730 and 731, 928 and 929, 1106 and 1107, 1296 and 1297, 1474 and 1475, 1664 and 1665, and 1854 and 1855. More preferred is that the CD3epsilon binding domain comprises or consists of a combination of VH and VL region of i) and ii) selected from the group consisting of SEQ ID NOs: 124 and 125, 362 and 363, 730 and 731, 928 and 929, 1106 and 1107, 1296 and 1297, 1474 and 1475, 1664 and 1665, and 1854 and 1855. Even more preferred is that the CD3epsilon binding domain comprises or consists of a combination of VH and VL region of i) and ii) selected from the group consisting of SEQ ID NOs: 124 and 125, 730 and 731, 1664 and 1665, and 1854 and 1855. In a yet even more preferred embodiment, the CD3epsilon binding domain comprises or consists of a combination of VH and VL region of i) and ii) selected from the group consisting of SEQ ID NOs: 730 and 731, 1664 and 1665, and 1854 and 1855.

[0143] In the most preferred embodiment, the VH region of i) comprises or consists of the sequence of EVQLVESGGGLVQPGGSLKLSCAASGFTFNKYAMNWVRQAPGKGLEWVARIRSKYNNYA TYYADSVKDRFTISRDDSKNTAYLQMNNLKTEDTAVYYCVRHGNFGNSYISYWAYWGQGT LVTVSS (SEQ ID NO: 1854); and the VL region of ii) comprises or consists of the sequence of QTVVTQEPSLTVSPGGTVTLTCGSSTGAVTSGNYPNWVQQKPGQAPRGLIGGTKFLAPGT PARFSGSLLGGKAALTLSGVQPEDEAEYYCVLWYSNRWVFGGGTKLTVL (SEQ ID NO: 1855).

[0144] As outlined herein above in relation to amino acid substitutions in the CDR sequences and also applying to this embodiment, the VH region of i) and/or VL region of ii) comprise one or more amino acid substitutions as specified herein above. Accordingly, at least one of the recited amino acid substitutions of the variable regions is comprised in said binding domain binding to an extracellular epitope of the human CD3ε chain. Said at least one or one or more amino acid substitution, in the case that only one amino acid substation is present, can be present in a CDR sequence in said VH or said VL region or, in case more than one amino acid substitution is present, in CDRs in both the VH and the VL region or restricted to CDR sequences in only the VH or the VL region. In certain embodiments where there are more than one amino acid substitutions, the substitutions are in the VH and the VL region or, alternatively, only in one variable region. Preferably, the substitutions are in the VH and the VL region.

[0145] Specifically, the VH of i) and/or VL region sequence of ii) comprises one or more amino acid substitutions selected from a. N30 (preferably S), X₆34V, X₆34F, Q39 (E, K, R, D, preferably E), L45 (M or V, preferably M), D64 (preferably E), X₇65A, X₁₂81V, X₁₂81T, X₁₂811, V99 (A or L, preferably A), H101 (preferably A or N), X₁₄102E, F104 (preferably I), N106 (preferably S or T) in the VH region sequence in i); and b. L20 (preferably I or M), V38 (1, L, M, F or Y, preferably I), X₁₁40R, X₁₁40K, X₂₄69 (S or E, preferably S), X₃₂91L, X₃₃93 (preferably Y), G102 (preferably S) in the VL region sequence in ii).

[0146] In the VH region sequence, the amino acid substitution at position 30 is, preferably, S (hence, can be written as N30S; same is true for the subsequent substitutions given according to their position number). The amino acid substitution at position 34 is V or F. Preferably, position 34 of the VH region sequence comprises an I or M, most preferred an 1. The amino acid substitution at position 39 is E, K, R, D, preferably E. The amino acid substitution at position 45 is preferably M or V, more preferred M. The amino acid substitution at position 64 is preferably E. The amino acid substitution at position 65 is A. The amino acid substitution at position 81 is V, T or I, preferably V. The amino acid substitution at position 99 is preferably A or L, more preferred A. The amino acid substitution at position 101 is preferably A or N, more preferred A (H1A). The amino acid substitution at position 102 is E. The amino acid substitution at position 104 is preferably 1. The amino acid substitution at position 106 is preferably S or T, more preferred S.

[0147] Notwithstanding the above, in the CDR-H2 sequence within the VH region sequence, the amino acid substitution at position 64 is, preferably, D15E, or the amino acid substitution at position 65 with amino acid A. Preferably, said CDR-H2 comprises the amino acid residue substitution at position 65 with amino acid A; in this case, a preferred amino acid for the last amino acid of CDR-H2 is D or G, preferred D. Hence, a preferred CDR-H2 sequence is RIRSKYNNYATYYADAVKD or RIRSKYNNYATYYADAVKG, with RIRSKYNNYATYYADAVKD more preferred. In case CDR-H2 contains two amino acid substitutions, the combination of the amino acid E at position 64 and amino acid A at position 64 are preferred; in this case, a preferred amino acid for the last amino acid of CDR-H2 is G. Hence, a preferred CDR-H2 sequence for the combination of the amino acid E at position 64 and amino acid A at position 65 is RIRSKYNNYATYYAEAVKG.

[0148] In the CDR-H3 sequence of the VH sequence, the amino acid substitutions are at position 101, preferably a substitution with amino acid A or N, more preferably A, at position 102 with amino acid E, at position 104, preferably with amino acid I, and at position 106, preferably with amino acid S or T. Preferably, CDR-H3 comprises the amino acid A or N at position 101, the amino acid S or T at position 106; in this case and if placeholders are present in the CDR-H3 sequence at the indicated positions, preferred amino acids for X₁₄ are G or A, most preferred G; for X₁₅ is I; for X₁₆ is Y; and for X₁₇ are W or Y. In case CDR-H3 comprises two amino acid substitutions, preferred combinations are the amino acid A at position 101 and the amino acid S at position 106; and the amino acid N at position 101 and the amino acid T at position 106; in this case and if placeholders are present in the CDR-H3 sequence at the indicated positions, a preferred amino acid for X₁₄ is G or A, most preferred G; for X₁₅ is I, for X₁₆ is Y, and for X₁₇ are W and F. In case CDR-H3 comprises three amino acid substitutions, preferred combinations are the amino acid A at position 101, the amino acid I at position 104, and the amino acid S at position 106; and the amino acid N at position 101, the amino acid I at position 104 and the amino acid T at position 106, in this case and if placeholders are present in the CDR-H3 sequence at the indicated positions, a preferred amino acid for X₁₅ is I, for X₁₆ is Y, and for X₁₇ are Wand F. In case CDR-H3 comprises four amino acid substitutions, a preferred combination is the amino acid N at position 101, the amino acid E at position 102, the amino acid I at position 104, and the amino acid T at position 106; in this case and if placeholders are present in the CDR-H3 sequence at the indicated positions, a preferred amino acid for X₁₅ is I, for X₁₆ is Y, and for X₁₇ is W. Hence, preferred CDR-H3 sequences are selected from AGNFGSSYISYWAY, NENIGTSYISYWAY, AGNFGTSYISYWAY, NANFGTSYISYFAY, and AGNFGSSYISYFAY, with AGNFGSSYISYWAY and AGNFGSSYISYFAY most preferred.

[0149] In the VL region sequence, the amino acid substitution at position 20 is preferably I or M, more preferred I. The amino acid substitution at position 38 is preferably I, L, M, F or Y, more preferred with I. The amino acid substitution at position 40 is preferably K or R, more preferred K. The amino acid substitution at position 69 is preferably S or E, more preferred S. The amino acid substitution at position 91 is L. The amino acid substitution at position 93 is preferably Y. The amino acid substitution at position 102 is preferably S.

[0150] Notwithstanding the above, in the CDR-L3 sequence within the VL region sequence, the amino acid substitution at position 1 is with amino acid L or the amino acid substitution is W93, preferably W93Y. Preferably, the CDR-L3 sequence is VLYYSNRWV when CDR-L3 comprises an amino acid substitution. It is preferred, however, that CDR-L3 does not comprise said X₁1L and W93 amino acid substitution, in which case a preferred CDR-L3 sequence is VLYYSNRWV.

[0151] In accordance with the foregoing, the amino acid substitution H101A in the VH region (part of CDR-H3) is preferably the amino acid substitution, in case there is only one amino acid substitution present in the CD3epsilon binding domain, within the VH and/or VL region sequences as defined herein. Furthermore, in case of combinations of amino acid substitutions as defined in iii) preferably H101A in the VH region sequence is one of the amino acid substitutions of said combination.

[0152] In a preferred embodiment of the polypeptide or polypeptide construct of the invention, wherein in addition to said one amino acid substitution or a combination thereof as defined in iii) X₆ is I; X₃ is G; X₁₂ is L, X₁₄ is A, X₁₇ is F in said VH region sequence; and/or X₃₂ is A in said VL region sequence. In a preferred embodiment of the polypeptide or polypeptide construct of claim 1 of the invention, in addition to said one amino acid substitution or a combination thereof as defined in iii) X₆ is I; X₃ is G; X₁₄ is A, X₁₇ is F in said VH region sequence; and/or X₃₂ is A in said VL region sequence. The one amino acid substitution or combination thereof as defined herein is/are in addition combined with specific amino acids at specific positions in the CDRs. Hence, at least one of the recited amino acid substitutions in accordance with iii) is present and at least one of X₃ is G; X₁₄ is A, X₁₇ is F in said VH region sequence; and/or X₃₂ is A in said VL region sequence is additionally present in the CDRs. As previously stated herein above, a preferred amino acid for X₆ is I or X₃ is G in said VH region sequence, if only one additional amino acid is present in the CDRs, wherein it is most preferred that X₅ is I in said VH region sequence. A preferred combination of two of said additional amino acids is X₆ is I and X₁₇ is F in said VH region sequence; or X₃ is G and X₁₇ is F in said VH region sequence. A preferred combination of three of said additional amino acids is X₆ is I, X₁₄ is A, and X₁₇ is F in said VH region sequence; or X₆ is I, X₁₇ is F in said VH region sequence, and X₃₂ is A in said VL region sequence. Since the latter amino acids are to be present additionally, it is understood that those recited additional amino acids that overlap in position with the amino acid substitution of iii) cannot replace the overlapping amino acid substitution. For example, if the only amino acid substitution in accordance with iii) is either X₆34V or X₆34F in CDR-H1, said amino acid cannot be replaced by amino acid I in said CDR-H1 sequence, since there would be no amino acid substitution as defined in iii) remaining in the binding domain. In other terms, there must always be at least one of the amino acid substitutions as defined in iii) comprised in the polypeptide or polypeptide construct of the invention.

[0153] It is also understood that depending on the actual sequence of the VH and/or VL region sequences, one or more of said additional amino acids may already be part of the given variable sequence as defined herein above or, if this is not the case, said given variable region will be changed to exhibit said additional amino acid(s) in combination with one amino acid substitution or a combination thereof as recited in iii).

[0154] In a preferred embodiment of the polypeptide or polypeptide construct of the invention, it comprises combinations of said amino acid substitutions as defined in iii) of two, three, four, five, six, seven, eight, nine, ten, eleven, twelve or more amino acid substitutions.

[0155] In a preferred embodiment of the polypeptide or polypeptide construct of the invention, i) said one acid substitution is selected from a. X₆34V, Q39E, Q39K, Q39R, Q39D, L45M, L45V, X₁₂81V, X₁₂81T, X₁₂811, V99A, V99L, H101A, H101N in the VH region; and b. V381, V38L, V38M, V38F, V38Y, X₁₁40R, X₁₁40K, X₂₄69S, X₂₄69E, X₃₂91L, X₃₃93Y; ii) said combination of two or more amino acid substitutions are selected from X₆34F and A81V (which may also be referred to as X₁₂81V) in the VH region; Q39E in the VH region and X₁₁40K in the VL region; Q39E in the VH region and X₁₁40R in the VL region; Q39D in the VH region and X₁₁40K in the VL region; Q39D in the VH region and X₁₁40R in the VL region; L45V in the VH region and V38F in the VL region; L45V in the VH region and V38Y in the VL region; L45M in the VH region and X₁₁40K in the VL region; L20I and G102S in the VL region; A81V in the VH region and X₁₁40K in the VL region; iii) said combination of three or more amino acid substitutions are selected from Q39E in the VH region, X₁₁40K and G102S in the VL region; Q39E in the VH region, X₁₁40R and G102S in the VL region; Q39D in the VH region, X₁₁40K and G102S in the VL region; Q39D in the VH region, X₁₁40R and G102S in the VL region; L45M in the VH region, X₁₁40K and G102S in the VL region; X₇65A, H101A, and N106S in the VH region; L20I, X₁₁40K, and G102S in the VL region; iv) said combination of four or more amino acid substitutions are selected from Q39E in the VH region, L20I, X₁₁40K and G102S in the VL region; Q39E in the VH region, L20I, X₁₁40R and G102S in the VL region; Q39D in the VH region, L20I, X₁₁40K and G102S in the VL region; Q39D in the VH region, L20I, X₁₁40R and G102S in the VL region; L45M in the VH region, L20I, X₁₁40K and G102S in the VL region; L20I, X₁₁40K, X₂₄69S, and G102S in the VL region; A81V in the VH region, L20I, X₁₁40K, and G102S in the VL region; and/or v) said combination of five, six, seven, eight, nine, ten, or more amino acid substitutions are selected from X₇65A, A81V, V99A, N106S in the VH region, L20I, X₁₁40K, X₂₄69S, and G102S in the VL region; D64E, X₇65A, A81V, X₁₄102E, F104I, N106T in the VH region, L20I, X₂₄69S, and G102S in the VL region; L45M, X₇65A, N106T in the VH region, L20I, X₁₁40K, X₂₄69S, and G102S in the VL region; X₇65A, A81V, V99A, H101A, F104I, N106S in the VH region, L20I, X₁₁40K, X₂₄69S, and G102S in the VL region; X₇65A, A81V, V99A, H101A, N106S in the VH region; A81V, V99A in the VH region, L20I, X₁₁40K, X₂₄69S, and G102S in the VL region; Q39E, A81V in the VH region, L20I, X₁₁40K, and G102S in the VL region; L45V in the VH region, L20I, V38F, X₁₁40K and G102S in the VL region.

[0156] In a more preferred embodiment of the polypeptide or polypeptide construct of the invention, said combination of amino acid substitutions is selected from:
[0157] i) in the VH region
   [0158] a. X₇65A, A81V, V99A, H101A and N106S;
   [0159] b. D64E, X₇65A, A81V, H101N, X₁₄102E, F104I, and N106S;
   [0160] c. L45M, X₇65A, H101A, and N106T;
   [0161] d. L45M, X₇65A, H101A, and N106S;
   [0162] e. Q39E, X₇65A, H101N, and N106T;
   [0163] f. D64E, X₇65A, V99A, H101A, and N106T;
   [0164] g. X₇65A, A81V, V99A, H101A, X₁₄102E, F104I, and N106T;
   [0165] h. X₇65A, A81V, H101N, X₁₄102E, F104I, and N106S;
   [0166] i. D64E, X₇65A, A81V, H101A, and N106S;
   [0167] j. D64E, X₇65A, H101A, and N106T;
   [0168] k. X₇65A, V99A, H101A, and N106T;
   [0169] l. D64E, X₇65A, H101A, and N106S;
   [0170] m. D64E, X₇65A, A81V, V99A, H101A, and N106S;
   [0171] n. X₇65A, H101A and N106S;
   [0172] o. N30S, Q39E, D64E, X₇65A, A81V, H101A, X₁₄102E, F104I, and N106T;
   [0173] p. L45M, D64E, X₇65A, H101A, and N106T;
   [0174] q. N30S, L45M, X₇65A, A81V, H101A, and N106T;
   [0175] r. N30S, L45M, D64E, X₇65A, A81V, H101A, and N106S;
[0176] ii) in the VL region
   [0177] a. L20I, X₁₁40K, X₂₄69S, and G102S;
   [0178] b. L20I, X₂₄69S, and G102S;
   [0179] c. L20I, V381, X₁₁40K, X₂₄69E, G102S and W93Y;
   [0180] d. X₁₁40K and G102S;
   [0181] e. L20I, X₁₁40K, X₂₄69S, G102S and W93Y;
   [0182] f. L20M, X₁₁40K and X₂₄69E;
   [0183] g. L20I, V381, X₁₁40K, X₂₄69E and G102S;
   [0184] h. X₁₁40K, X₂₄69S and W93Y;
   [0185] i. X₁₁40K and X₂₄69S; and
[0186] iii) a combination of one amino acid substitution combination of i) and ii).

[0187] In yet another preferred embodiment of the polypeptide or polypeptide construct of the invention, said combination of amino acid substitution combinations of iii) is selected from:
[0188] a. X₇65A, A81V, V99A, H101A, N106S in the VH region, L20I, X₁₁40K, X₂₄69S, and G102S in the VL region;
[0189] b. D64E, X₇65A, A81V, H101N, X₁₄102E, F104I, N106S in the VH region, L20I, X₂₄69S, and G102S in the VL region:
[0190] c. L45M, X₇65A, H101A, N106T in the VH region, L20I, X₁₁40K, X₂₄69S, and G102S in the VL region;
[0191] d. L45M, X₇65A, H101A, N106S in the VH region, L20I, V381, X₁₁40K, X₂₄69E, G102S and W93Y in the VL region;
[0192] e. Q39E, X₇65A, H101N, N106T in the VH region, X₁₁40K and G102S in the VL region;
[0193] f. D64E, X₇65A, V99A, H101A, N106T in the VH region, X₁₁40K and G102S in the VL region;
[0194] g. X₇65A, A81V, V99A, H101A, X₁₄102E, F104I, N106T in the VH region, L20I, X₁₁40K, X₂₄69S, and G102S in the VL region;
[0195] h. X₇65A, A81V, H101N, X₁₄102E, F104I, N106S in the VH region, L20I, X₂₄69S, and G102S in the VL region;
[0196] i. D64E, X₇65A, A81V, H101A, N106S in the VH region, L20I, X₂₄69S, and G102S in the VL region;
[0197] j. D64E, X₇65A, H101A, N106T in the VH region, X₁₁40K and G102S in the VL region;
[0198] k. X₇65A, V99A, H101A, N106T in the VH region, X₁₁40K and G102S in the VL region;
[0199] l. D64E, X₇65A, H101A, N106S in the VH region, X₁₁40K and G102S in the VL region;
[0200] m. D64E, X₇65A, A81V, V99A, H101A, N106S in the VH region, L20I, X₁₁40K, X₂₄69S, G102S and W93Y in the VL region;
[0201] n. X₇65A, H101A N106S in the VH region, X₁₁40K and G102S in the VL region;
[0202] o. N30S, Q39E, D64E, X₇65A, A81V, H101A, X₁₄102E, F104I, N106T in the VH region, L20M, X₁₁40K and X₂₄69E in the VL region;
[0203] p. L45M, D64E, X₇65A, H101A, N106T in the VH region, L20I, V381, X₁₁40K, X₂₄69E and G102S in the VL region;
[0204] q. N30S, L45M, X₇65A, A81V, H101A, N106T in the VH region, X₁₁40K and X₂₄69S in the VL region; and
[0205] r. N30S, L45M, D64E, X₇65A, A81V, H101A, N106S in the VH region, X₁₁40K and X₂₄69S in the VL region.

[0206] In another preferred embodiment of the polypeptide or polypeptide construct of the invention, in said combination of amino acid substitution combinations defined in:
[0207] a. and m. X₆ is I in said VH region sequence;
[0208] b. and r. X₃ is G in said VH region sequence;
[0209] c. X₁₂ is L in said VH region;
[0210] d. X₁₂ is L and X₁₇ is F in said VH region;
[0211] e. X₆ is I, X₁₄ is A and X₁₇ is F in said VH region sequence;
[0212] f. X₆ is I in said VH region sequence; and X₃₂ is A in said VL region sequence;
[0213] g. X₆ is I in said VH region sequence;
[0214] h. and i. X₃ is G in said VH region sequence;
[0215] j., l. and n. X₆ is I and X₁₇ is F in said VH region sequence; and X₃₂ is A in said VL region sequence;
[0216] k. X₆ is I said VH region sequence; and X₃₂ is A in said VL region sequence;
[0217] p. X₁₂ is L in said VH region; or
[0218] q. X₃ is G and X₁₇ is F in said VH region sequence.

[0219] Examples of VH and VL region sequences as defined in this embodiment are defined by SEQ ID NOs: 2012 and 2013; 2020 and 2021; 2028 and 2029; 2036 and 2037; 2044 and 2045; 26 and 27; 34 and 35; 42 and 43; 50 and 51; 58 and 59; 66 and 67; 74 and 75; 82 and 83; 90 and 91; 98 and 99; 100 and 101; 108 and 109; 116 and 117. Table 2 evidences the increase of the aforementioned VH and VL region sequence combinations of the CD3epsilon binding domain in temperature stability over the CD3epsilon binding domain comprising a VH and VL combination defined as “I2C” (SEQ ID NOs: 1854 and 1855, respectively).

[0220] In accordance with the invention, the binding domain of the polypeptide or polypeptide construct of the invention that binds to an extracellular epitope of the human CD3ε chain and comprising or consisting of a VH region and a VL region as defined herein comprises at least one of the following CDR sequences or a combination thereof as defined in SEQ ID NOs: 1878, 1908, 1989, and 2003. Said sequences contain one amino acid substitution or a combination thereof as defined in iii), and in some instances also said additional amino acids as defined herein above. Preferred combinations of said CDR sequences are listed in the following in the order of CDR-H1, CDR-H2, CDR-H3, CDR-11, CDR-L2, CDR-L3: 1878 to 1883; 1908 to 1913; 1984 to 1989; 1998 to 2003.

[0221] Also in accordance with the invention are CDR sequence combinations in the order of CDR-H1, CDR-H2, CDR-H3, CDR-L1, CDR-L2, CDR-L3 as defined in SEQ ID NOs: 126 to 131; 134 to 139; 142 to 147; 150 to 155; 158 to 163.

[0222] Also in accordance with the invention and more preferred are CDR sequence combinations as defined in SEQ ID NOs (listed in the order of CDR-H1, CDR-H2, CDR-H3, CDR-L1, CDR-L2, CDR-L3): 2006 to 2011; 2014 to 2019; 2022 to 2027; 2030 to 2035; 2038 to 2043; 20 to 25; 36 to 41; 44 to 49; 52 to 57; 60 to 65; 68 to 73; 76 to 81; 84 to 89; 92 to 97; 102 to 107; 110 to 115. Further examples are SEQ ID NOs: 282 to 287; 290 to 295; 298 to 303; 306 to 311; 314 to 319; 472 to 477; 480 to 485; 488 to 493; 496 to 501; 504 to 509; 650 to 655; 658 to 663; 666 to 671; 674 to 679; 682 to 687; 840 to 845; 848 to 853; 856 to 861; 864 to 869; 872 to 877; 1026 to 1031; 1034 to 1039; 1042 to 1047; 1050 to 1055; 1058 to 1063; 1216 to 1221; 1224 to 1229; 1232 to 1237; 1240 to 1245; 1248 to 1253; 1394 to 1399; 1402 to 1407; 1410 to 1415; 1418 to 1423; 1426 to 1431; 1584 to 1589; 1592 to 1597; 1600 to 1605; 1608 to 1613; 1616 to 1621; 1774 to 1779; 1782 to 1787; 1790 to 1795; 1798 to 1803; 1806 to 1811;

[0223] In accordance with the invention, the binding domain of the polypeptide or polypeptide construct of the invention that binds to an extracellular epitope of the human CD3ε chain comprises or consists of a VH region sequence as defined in the following SEQ ID NOs: 1856, 1860, 1862, 1864, 1872, 1884, 1894, 1896, 1898, 1900, 1902, 1904, 1906, 1914, 1916, 1918, 1920, 1922, 1924, 1926, 1928, 1930, 1932, 1934, 1936, 1938, 1940, 1942, 1944, 1946, 1948, 1950. Said sequences contain one amino acid substitution or a combination thereof as defined herein above, and in some instances also said additional amino acids as defined herein above. This is also true for the below embodiments characterizing by sequence ID number CD3epsilon binding domains that result from amino acid residue exchanges as specified herein.

[0224] In accordance with the invention, the binding domain of the polypeptide or polypeptide construct of the invention that binds to an extracellular epitope of the human CD3ε chain comprises or consists of a VL region sequence as defined in the following SEQ ID NOs: 1867, 1869, 1871, 1875, 1877, 1899, 1901, 1903, 1905, 1907, 1919, 1921, 1923, 1925, 1927, 1929, 1931, 1933, 1935, 1937, 1939, 1941, 1943, 1961, 1963, 1965, 1967, 1969, 1971, 1975, 1991, 1993, 1995, 1997, or 2005.

[0225] Preferred combinations of VH and VL region sequences of said binding domain of the polypeptide or polypeptide construct of the invention that binds to an extracellular epitope of the human CD3ε chain are defined in the following SEQ ID NOs: 1856 and 1857; 1860 and 1861; 1862 and 1863; 1864 and 1865; 1866 and 1867; 1868 and 1869; 1870 and 1871; 1872 and 1873; 1874 and 1875; 1876 and 1877; 1884 and 1885; 1894 and 1895; 1896 and 1897; 1898 and 1899; 1900 and 1901; 1902 and 1903; 1904 and 1905; 1906 and 1907; 1914 and 1915; 1916and 1917; 1918 and 1919; 1920and 1921; 1922 and 1923; 1924 and 1925; 1926 and 1927; 1928 and 1929; 1930 and 1931; 1932 and 1933; 1934 and 1935; 1936 and 1937; 1938 and 1939; 1940 and 1941; 1942 and 1943; 1944 and 1945; 1946 and 1947; 1948 and 1949; 1950 and 1951; 1960 and 1961; 1962 and 1963; 1964 and 1965; 1966 and 1967; 1968 and 1969; 1970 and 1971; 1974 and 1975; 1990 and 1991; 1992 and 1993; 1994 and 1995; 1996 and 1997; or 2004 and 2005.

[0226] Also in accordance with the invention are VH region sequences as defined in SEQ ID NO: 132, 140, 148, 156, and 164.

[0227] Also in accordance with the invention are VL region sequences as defined in SEQ ID NO: 133, 141, 149, 157, and 165.

[0228] Also in accordance with the invention are any combinations of the foregoing particularly preferred VH and VL region sequences. Preferred are the following VH and VL combinations as defined by SEQ ID NOs: 132 and 133; 140 and 141; 148 and 149; 156 and 157; and 164 and 165.

[0229] Also in accordance with the invention and more preferred are VH region sequences as defined in SEQ ID NO: 2012, 2020, 2028, 2036, 2044, 26, 34, 42, 50, 58, 66, 74, 82, 90, 98, 100, 108, and 116. Further examples are SEQ ID NOs: 288, 296, 304, 312, 320, 478, 486, 494, 502, 510, 656, 664, 672, 680, 688, 846, 854, 862, 870, 878, 1032, 1040, 1048, 1056, 1064, 1222, 1230, 1238, 1246, 1254, 1400, 1408, 1416, 1424, 1432, 1590, 1598, 1606, 1614, 1622, 1780, 1788, 1796, 1804, and 1812.

[0230] Also in accordance with the invention and more preferred are VL region sequences as defined in SEQ ID NO: 2013, 2021, 2029, 2037, 2045, 27, 35, 43, 51, 59, 67, 75, 83, 91, 99, 101, 109, and 117. Further examples are SEQ ID NOs: 289, 297, 305, 313, 321, 479, 487, 495, 503, 511, 657, 665, 673, 681, 689, 847, 855, 863, 871, 879, 1033, 1041, 1049, 1057, 1065, 1223, 1231, 1239, 1247, 1255, 1401, 1409, 1417, 1425, 1433, 1591, 1599, 1607, 1615, 1623, 1781, 1789, 1797, 1805, and 1813.

[0231] Also in accordance with the invention and preferred are any combinations of the foregoing particularly preferred VH and VL region sequences. Preferred are the following VH and VL combinations as defined by SEQ ID NOs: 2012 and 2013; 2020 and 2021; 2028 and 2029; 2036 and 2037; 2044 and 2045; 26 and 27; 34 and 35; 42 and 43; 50 and 51; 58 and 59; 66 and 67; 74 and 75; 82 and 83; 90 and 91; 98 and 99; 100 and 101; 108 and 109; and 116 and 117. Further examples are SEQ ID NOs: 288 and 289; 296 and 297; 304 and 305; 312 and 313; 320 and 321; 478 and 479; 486 and 487; 494 and 495; 502 and 503; 510 and 511; 656 and 657; 664 and 665; 672 and 673; 680 and 681; 688 and 689; 846 and 847; 854 855; 862 and 863; 870 and 871; 878 and 879; 1032 and 1033; 1040 and 1041; 1048 and 1049; 1056 and 1057; 1064 and 1065; 1222 and 1223; 1230 and 1231; 1238 and 1239; 1246 and 1247; 1254 and 1255; 1400 and 1401; 1408 and 1409; 1416 and 1417; 1424 and 1425; 1432 and 1433; 1590 and 1591; 1598 and 1599; 1606 and 1607; 1614 and 1615; 1622 and 1623; 1780 and 1781; 1788 and 1789; 1796 and 1797; 1804 and 1805; and 1812 and 1813.

[0232] In accordance with the invention, said binding domain of the polypeptide or polypeptide construct of the invention that binds to an extracellular epitope of the human CD3ε chain comprises or consists of a VH region sequence selected from SEQ ID NOs: 2012, 2020, 2028, 2036, 2044, 26, 34, 42, 50, 58, 66, 74, 82, 90, 98, 100, 108, 116, 288, 296, 304, 312, 320, 478, 486, 494, 502, 510, 656, 664, 672, 680, 688, 846, 854, 862, 870, 878, 1032, 1040, 1048, 1056, 1064, 1222, 1230, 1238, 1246, 1254, 1400, 1408, 1416, 1424, 1432, 1590, 1598, 1606, 1614, 1622, 1780, 1788, 1796, 1804, 1812, 1856, 1860, 1862, 1864, 1872, 1884, 1894, 1896, 1898, 1900, 1902, 1904, 1906, 1914, 1916, 1918, 1920, 1922, 1924, 1926, 1928, 1930, 1932, 1934, 1936, 1938, 1940, 1942, 1944, 1946, 1948, 1950, 132, 140, 148, 156, and 164; and/or a VL region sequence selected from SEQ ID NOs: 2013, 2021, 2029, 2037, 2045, 27, 35, 43, 51, 59, 67, 75, 83, 91, 99, 101, 109, and 117, 289, 297, 305, 313, 321, 479, 487, 495, 503, 511, 657, 665, 673, 681, 689, 847, 855, 863, 871, 879, 1033, 1041, 1049, 1057, 1065, 1223, 1231, 1239, 1247, 1255, 1401, 1409, 1417, 1425, 1433, 1591, 1599, 1607, 1615, 1623, 1781, 1789, 1797, 1805, 1813, 1867, 1869, 1871, 1875, 1877, 1899, 1901, 1903, 1905, 1907, 1919, 1921, 1923, 1925, 1927, 1929, 1931, 1933, 1935, 1937, 1939, 1941, 1943, 1961, 1963, 1965, 1967, 1969, 1971, 1975, 1991, 1993, 1995, 1997, 2005, 133, 141, 149, 157, and 165.

[0233] According to the invention, it is preferred that the polypeptide or polypeptide construct comprises: a binding domain binding to an extracellular epitope of the human CD3ε chain comprising or consisting of i) a VH region and ii) a VL region, wherein said VH and VL region of i) and ii) is selected from the VH and VL region combination as defined in SEQ ID NOs: 124 and 125, 172 and 173, 362 and 363, 552 and 553, 730 and 731, 928 and 929, 1106 and 1107, 1296 and 1297, 1474 and 1475, 1664 and 1665, and 1854 and 1855, wherein said one amino acid substitution or a combination thereof in said VH and/or VL region sequence results in a VH and/or a VL region sequence having the amino acid residue:
[0234] i. I at position 34, A at position 65, V at position 81, A at position 99, A at position 101, S at position 106 in the VH region sequence, I at position 20, K at position 40, S at position 69, and S at position 102 in the VL region sequence;
   [0235] M at position 45, A at position 65, L at position 81, A at position 101, T at position 106 in the VH region sequence, I at position 20, K at position 40, S at position 69 and S at position 102 in the VL region sequence;
   [0236] M at position 45, A at position 65, L at position 81, A at position 101, S at position 106, F at position 112 in the VH region sequence, I at position 20, I at position 38, K at position 40, E at position 69, S at position 102 and Y at position 93 in the VL region sequence;
   [0237] I at position 34, E at position 39, A at position 65, N at position 101, A at position 102,
   [0238] T at position 106, F at position 112 in the VH region sequence, K at position 40 and S at position 102 in the VL region sequence;
   [0239] I at position 34, E at position 64, A at position 65, A at position 99, A at position 101, T at position 106 in the VH region sequence, K at position 40, A at position 91 and S at position 102 in the VL region sequence;
   [0240] I at position 34, A at position 65, V at position 81, A at position 99, A at position 101, E at position 102, I at position 104, T at position 106 in the VH region sequence, I at position 20, K at position 40, S at position 69 and S at position 102 in the VL region sequence;
   [0241] E at position 64, A at position 65, G at position 68, V at position 81, A at position 101, S at position 106 in the VH region sequence, I at position 20, S at position 69 and S at position 102 in the VL region sequence;
   [0242] I at position 34, E at position 64, A at position 65, A at position 101, T at position 106, F at position 112 in the VH region sequence, K at position 40, A at position 91 and S at position 102 in the VL region sequence;
   [0243] I at position 34, E at position 64, A at position 65, A at position 101, S at position 106, F at position 112 in the VH region sequence, K at position 40, A at position 91 and S at position 102 in the VL region sequence;
   [0244] I at position 34, E at position 64, A at position 65, V at position 81, A at position 99, A at position 101, S at position 106 in the VH region sequence, I at position 20, K at position 40, S at position 69, S at position 102 and Y at position 93 in the VL region sequence;
   [0245] I at position 34, A at position 65, A at position 101, S at position 106, F at position 112 in the VH region sequence, K at position 40, A at position 91 and S at position 102 in the VL region sequence;
   [0246] M at position 45, E at position 64, A at position 65, L at position 81, A at position 101, T at position 106 in the VH region sequence, I at position 20, I at position 38, K at position 40, E at position 69 and S at position 102 in the VL region sequence;
   [0247] S at position 30, M at position 45, A at position 65, G at position 68, V at position 81, A at position 101, T at position 106, F at position 112 in the VH region sequence, K at position 40, S at position 69 and Y at position 93 in the VL region sequence; and
   [0248] S at position 30, M at position 45, E at position 64, A at position 65, G at position 68, V at position 81, A at position 101, S at position 106 in the VH region sequence, K at position 40 and S at position 69 in the VL region sequence;
[0249] ii. E at position 64, A at position 65, G at position 68, V at position 81, N at position 101, E at position 102, I at position 104, T at position 106 in the VH region sequence, I at position 20, S at position 69 and S at position 102 in the VL region sequence;
   [0250] A at position 65, G at position 68, V at position 81, N at position 101, E at position 102, I at position 104, S at position 106 in the VH region sequence, I at position 20, S at position 69 and S at position 102 in the VL region sequence;
   [0251] I at position 34, A at position 65, A at position 99, A at position 101, T at position 106 in the VH region sequence, K at position 40, A at position 91 and S at position 102 in the VL region sequence; and
   [0252] S at position 30, E at position 39, E at position 64, A at position 65, V at position 81, A at position 101, E at position 102, 1 at position 104, T at position 106 in the VH region sequence, M at position 20, K at position 40 and E at position 69 in the VL region sequence;
[0253] iii. A at position 101 in the VH region sequence;
[0254] iv. V at position 81, A at position 99_in the VH region sequence, I at position 20, K at position 40, S at position 69 and S at position 102 in the VL region sequence;
   [0255] I at position 34,_V at position 81 in the VH region sequence, I at position 20,_K at position 40 and S at position 102 in the VL region sequence;
   [0256] I at position 34 in the VH region sequence, I at position 20,_K at position 40_and S at position 102 in the VL region sequence;
   [0257] I at position 34,_E at position 39,_V at position 81 in the VH region sequence, I at position 20,_K at position 40 and S at position 102 in the VL region sequence;
[0258] v. I at position 34,_V at position 81 in the VH region sequence, and K at position 40 in the VL region sequence;
   [0259] M at position 45 in the VH region sequence, I at position 20,_K at position 40 and S at position 102 in the VH region sequence;
   [0260] I at position 34,_A at position 65,_A at position 101 and_S at position 106S in the VH region sequence;
   [0261] I at position 20,_K at position 40,_S at position 69 and_S at position 102 in the VL region sequence;
   [0262] F at position 34_and V at position 81 in the VH region sequence;
   [0263] M at position 45 in the VH region sequence, K at position 40 and_S at position 102 in the VL region sequence;
   [0264] D at position 39 in the VH region sequence, I at position 20,_K at position 40 and S at position 102 in the VL region sequence;
   [0265] I at position 34_and V at position 81 in the VH region sequence;
   [0266] E at position 39 in the VH region sequence, I at position 20,_K at position 40 and S at position 102 in the VL region sequence;
   [0267] M at position 45 in the VH region sequence and K at position 40 in the VL region sequence;
   [0268] I at position 34,_A at position 65,_V at position 81,_A at position 99,_A at position 101_and S at position 106 in the VH region sequence; or
[0269] vi. D at position 39 in the VH region sequence,_I at position 20,_R at position 40 and_S at position 102 in the VL region sequence;
   [0270] I at position 34 in the VH region sequence;
   [0271] K at position 40 in the VL region sequence;
   [0272] D at position 39_in the VH region sequence, K at position 40 and S at position 102 in the VL region sequence;
   [0273] I at position 20 and S at position 102 in the VH region sequence; K at position 39 in the VH region sequence;
   [0274] E at position 39 in the VH region sequence,_K at position 40_and S at position 102 in the VL region sequence;
   [0275] E at position 39 in the VH region sequence,_I at position 20,_R at position 40_and S at position 102 in the VL region sequence;
   [0276] D at position 39_in the VH region sequence,_R at position 40_and S at position 102 in the VL region sequence;
   [0277] V at position 81 in the VH region sequence;
   [0278] D at position 39 in the VH region sequence and_K at position 40 in the VL region sequence;
   [0279] F at position 112 in the VH region sequence;
   [0280] F at position 112 in the VH region sequence and_I at position 38 in the VL region sequence;
   [0281] E at position 39 in the VH region sequence and K at position 40 in the VL region sequence;
   [0282] V at position 34 in the VH region sequence.

[0283] The above recited amino acid residues are present at the given position(s) in the CD3epsilon binding domain according to the invention. In case one of the VH and/or VL region sequences that are to be changed (the VH region of i) and the VL region of ii)), i.e. the base VH and/or VL region sequence, already contain one of the above recited amino acid residues at a given position, it follows that these cannot changed since the respective amino acid residue is already present in the VH region and/or VL region of i) and/or ii).

[0284] More preferred is that the CD3epsilon binding domain comprises or consists of a combination of VH and VL region of i) and ii) selected from the group consisting of SEQ ID NOs: 124 and 125, 362 and 363, 730 and 731, 928 and 929, 1106 and 1107, 1296 and 1297, 1474 and 1475, 1664 and 1665, and 1854 and 1855. Even more preferred is that the CD3epsilon binding domain comprises or consists of a combination of VH and VL region of i) and ii) selected from the group consisting of SEQ ID NOs: 124 and 125, 730 and 731, 1664 and 1665, and 1854 and 1855. In a yet even more preferred embodiment, the CD3epsilon binding domain comprises or consists of a combination of VH and VL region of i) and ii) selected from the group consisting of SEQ ID NOs: 730 and 731, 1664 and 1665, and 1854 and 1855. Most preferred is that said CD3epsilon binding domain comprises or consists of a combination of VH and VL region of i) and ii) of SEQ ID NOs: 1854 and 1855, respectively.

[0285] As evident from the example section, the above recited amino acid residues at the given position(s) have a favorable effect on an increase of the temperature stability that is measured by the well know and also herein described method of DSF (Differential Scanning Fluorimetry; cf. e.g., Wen et al., “Nano differential scanning fluorimetry for comparability studies of therapeutic proteins”, Analytical Biochemistry, Volume 593, 2020, 113581, ISSN 0003-2697; Dart, M. L., et al. (2018). “Homogeneous Assay for Target Engagement Utilizing Bioluminescent Thermal Shift”. ACS medicinal chemistry letters, 9(6), 546-551) when introduced in the above recited VH and VL sequences of i) and ii). More specifically, the amino acid residues at the given positions recited in sections i. and iv. exhibit an increase in temperature stability of 6° C. or more as compared to the value measured for the unmodified sequence, i.e. the respective base VH and VL sequence. Section ii. and v. exhibit an increase in temperature stability of 3° C. or more as compared to the value measured for the unmodified sequence, i.e. the respective base VH and VL sequence, whereas sections iii. and vi. exhibit an increase in temperature stability of 1° C. or more as compared to the value measured for the unmodified sequence, i.e. the respective base VH and VL sequence. Preferably, the amino acid residues at the given position(s) in section i. ii., iv., and/or v. are present in the CD3epsilon binding domain according to this embodiment. More preferred is that the amino acid residues at the given position(s) in section i. and/or iv. are present in the CD3epsilon binding domain according to the invention. This preference also applies to the preferred embodiments recited in the following. As outlined herein, it is also preferred that the VH and VL region is linked by a linker, preferably a peptide linker most preferred a G₄S or a G₄Q linker, preferably said G₄S or a G₄Q linker is repeated three times, i.e. it is a (G₄S)₃ or a (G₄Q)₃ linker.

[0286] According to the invention, it relates to a polypeptide or polypeptide construct comprising: a binding domain binding to an extracellular epitope of the human CD3ε chain comprising or consisting of a VH region and a VL region, wherein
[0287] a) the VH region comprises or consist of the sequence as defined in SEQ ID NO: 1854 and the VL region comprises or consists of the sequence as defined in SEQ ID NO: 1855; and wherein the VH and/or VL region sequence comprise the amino acid substitution(s) selected from:
   [0288] i. M34I, S65A, A81V, V99A, H101A, N106S in the VH region sequence (resulting VH sequence as defined in SEQ ID NO: 2012), L20I, Q40K, L69S, and G102S in the VL region sequence (resulting VL sequence as defined in SEQ ID NO: 2013);
      [0289] L45M, S65A, A81L, H101A, N106T in the VH region sequence (SEQ ID NO: 2036), L20I, Q40K, L69S, and G102S in the VL region sequence (SEQ ID NO: 2037);
      [0290] L45M, S65A, A81L, H101A, N106S, W112F in the VH region sequence (SEQ ID NO: 2028), L20I, V381, Q40K, L69E, G102S and W93Y in the VL region sequence (SEQ ID NO: 2029);
      [0291] M34I, Q39E, S65A, H101N, G102A, N106T, W112F in the VH region sequence (SEQ ID NO: 2044), Q40K and G102S in the VL region sequence (SEQ ID NO: 2045);
      [0292] M34I, D64E, S65A, V99A, H101A, N106T in the VH region sequence (SEQ ID NO: 34), Q40K, V91A and G102S in the VL region sequence (SEQ ID NO: 35);
      [0293] M34I, S65A, A81V, V99A, H101A, G102E, F104I, N106T in the VH region sequence (SEQ ID NO: 90), L20I, Q40K, L69S, and G102S in the VL region sequence (SEQ ID NO: 91);
      [0294] D64E, S65A, D68G, A81V, H101A, N106S in the VH region sequence (SEQ ID NO: 100), L20I, L69S, and G102S in the VL region sequence (SEQ ID NO: 101);
      [0295] M34I, D64E, S65A, H101A, N106T, W112F in the VH region sequence (SEQ ID NO: 58), Q40K, V91A and G102S in the VL region sequence (SEQ ID NO: 59);
      [0296] M34I, D64E, S65A, H101A, N106S, W112F in the VH region sequence (SEQ ID NO: 50), Q40K, V91A and G102S in the VL region sequence (SEQ ID NO: 51);
      [0297] M34I, D64E, S65A, A81V, V99A, H101A, N106S in the VH region sequence (SEQ ID NO: 98), L20I, Q40K, L69S, G102S and W93Y in the VL region sequence (SEQ ID NO: 99);
      [0298] M34I, S65A, H101A, N106S, W112F in the VH region sequence (SEQ ID NO: 42), Q40K, V91A and G102S in the VL region sequence (SEQ ID NO: 43);
      [0299] L45M, D64E, S65A, A81L, H101A, N106T in the VH region sequence (SEQ ID NO: 116), L20I, V381, Q40K, L69E and G102S in the VL region sequence (SEQ ID NO: 117);
      [0300] N30S, L45M, S65A, D68G, A81V, H101A, N106T, W112F in the VH region sequence (SEQ ID NO: 82), Q40K, L69S and W93Y in the VL region sequence (SEQ ID NO: 83); and
      [0301] N30S, L45M, D64E, S65A, D68G, A81V, H101A, N106S in the VH region sequence (SEQ ID NO: 74), Q40K and L69S in the VL region sequence (SEQ ID NO: 75);
   [0302] ii. D64E, S65A, D68G, A81V, H101N, G102E, F104I, N106T in the VH region sequence (SEQ ID NO: 2020), L20I, L69S, and G102S in the VL region sequence (SEQ ID NO: 2021);
      [0303] S65A, D68G, A81V, H101N, G102E, F104I, N106S in the VH region sequence (SEQ ID NO: 108), L20I, L69S, and G102S in the VL region sequence (SEQ ID NO: 109);
      [0304] M34I, S65A, V99A, H101A, N106T in the VH region sequence (SEQ ID NO: 26), Q40K, V91A and G102S in the VL region sequence (SEQ ID NO: 27); and
      [0305] N30S, Q39E, D64E, S65A, A81V, H101A, G102E, F104I, N106T in the VH region sequence (SEQ ID NO: 66), L20M, Q40K and L69E in the VL region sequence (SEQ ID NO: 67);
   [0306] iii. H101A in the VH region sequence (SEQ ID NO: 2560);
   [0307] iv. A81V, V99A_in the VH region sequence, L20I, Q40K, L69S and G102S in the VL region sequence;
      [0308] M34I,_A81V in the VH region sequence (SEQ ID NO: 1898),_L20I,_Q40K and_G102S in the VL region sequence (SEQ ID NO: 1899);
      [0309] M34I in the VH region sequence (SEQ ID NO: 1904), L20I,_Q40K_and G102S in the VL region sequence (1905);
      [0310] M34I,_Q39E,_A81V in the VH region sequence (SEQ ID NO: 1906), L20I,_Q40K and_G102S in the VL region sequence (SEQ ID NO: 1907);
   [0311] v. M34I,_A81V in the VH region sequence (SEQ ID NO: 1900), and Q40K in the VL region sequence (SEQ ID NO: 1901);
      [0312] L45M in the VH region sequence (SEQ ID NO: 1866),_L20I,_Q40K and_G102S in the VH region sequence (SEQ ID NO: 1867);
      [0313] M34I,_S65A,_H101A and_N106S in the VH region sequence; L20I,_Q40K,_L69S and_G102S in the VL region sequence; M34F_and A81V in the VH region sequence (SEQ ID NO: 1884);
      [0314] L45M in the VH region sequence (SEQ ID NO: 1870), Q40K and_G102S in the VL region sequence (SEQ ID NO: 1871); Q39D in the VH region sequence (SEQ ID NO: 1918), L20I,_Q40K and G102S in the VL region sequence (SEQ ID NO: 1919);
      [0315] M34I_and A81V in the VH region sequence (SEQ ID NO: 1869); Q39E in the VH region sequence (SEQ ID NO:_1932), L20I,_Q40K and_G102S in the VL region sequence (SEQ ID NO: 1933);
      [0316] L45M in the VH region sequence (SEQ ID NO:_1868)_and_Q40K in the VI region sequence (SEQ ID NO: 1869);
      [0317] M34I,_S65A,_A81V,_V99A,_H101A_and N106S in the VH region sequence; or
   [0318] vi. Q39D in the VH region sequence (SEQ ID NO: 1928),_L20I,_Q40R and_G102S in the VL region sequence (SEQ ID NO: 1929);
      [0319] M34I in the VH region sequence (SEQ ID NO: 1892); Q40K in the VL region sequence (SEQ ID NO: 1974); Q39D_in the VH region sequence (SEQ ID NO: 1922), Q40K and_G102S in the VL region sequence (SEQ ID NO: 1923);
      [0320] L20I and_G102S in the VH region sequence;
      [0321] Q39K in the VH region sequence (SEQ ID NO: 1944);
      [0322] Q39E in the VH regions sequence (SEQ ID NO: 1938),_Q40K_and G102S in the VL region sequence (SEQ ID NO: 1939);
      [0323] Q39E in the VH region sequence (SEQ ID NO: 1934),_L20I,_Q40R_and G102S in the VL region sequence (SEQ ID NO: 1935);
      [0324] Q39D_in the VH region sequence (SEQ ID NO: 1926),_Q40R_and G102S in the VL region sequence (SEQ ID NO: 1926);
      [0325] A81V in the VH region sequence (SEQ ID NO: 1862);
      [0326] Q39D in the VH region sequence (SEQ ID NO: 1920) and_Q40K in the VL region sequence (SEQ ID NO: 1921);
      [0327] W112F in the VH region sequence (SEQ ID NO: 1958);
      [0328] W112F in the VH region sequence (SEQ ID NO: 1960) and_V381 in the VL region sequence (SEQ ID NO: 1961);
      [0329] Q39E in the VH region sequence (SEQ ID NO: 1936)_and_Q40K in the VL region sequence (SEQ ID NO: 1937);
      [0330] M34V in the VH region sequence (SEQ ID NO: 1914);
[0331] b) the VH region comprises or consist of the sequence as defined in SEQ ID NO: 730 and the VL region comprises or consists of the sequence as defined in SEQ ID NO: 731; and wherein the VH and/or VL region sequence comprise the amino acid substitution(s) selected from:
   [0332] i. M34I, S65A, A81V, V99A, H101A, N106S in the VH region sequence (resulting VH sequence as defined in SEQ ID NO: 846), L20I, Q40K, L69S, and G102S in the VL region sequence (resulting VL sequence as defined in SEQ ID NO: 847);
      [0333] L45M, S65A, A81L, H101A, N106T in the VH region sequence (SEQ ID NO: 870), L20I, Q40K, L69S, and G102S in the VL region sequence (SEQ ID NO: 871);
      [0334] L45M, S65A, A81L, H101A, N106S, W112F in the VH region sequence (SEQ ID NO: 862), L20I, V381, Q40K, L69E, G102S and W93Y in the VL region sequence (SEQ ID NO: 863);
      [0335] M34I, Q39E, S65A, H101N, G102A, N106T, W112F in the VH region sequence (SEQ ID NO: 878), Q40K and G102S in the VL region sequence (SEQ ID NO: 879);
      [0336] M34I, D64E, S65A, V99A, H101A, N106T in the VH region sequence, Q40K, V91A and G102S in the VL region sequence;
      [0337] M34I, S65A, A81V, V99A, H101A, G102E, F104I, N106T in the VH region sequence, L20I, Q40K, L69S, and G102S in the VL region sequence; D64E, S65A, A81V, H101A, N106S in the VH region sequence, L20I, L69S, and G102S in the VL region sequence;
      [0338] M34I, D64E, S65A, H101A, N106T, W112F in the VH region sequence, Q40K, V91A and G102S in the VL region sequence;
      [0339] M34I, D64E, S65A, H101A, N106S, W112F in the VH region sequence, Q40K, V91A and G102S in the VL region sequence;
      [0340] M34I, D64E, S65A, A81V, V99A, H101A, N106S in the VH region sequence, L20I, Q40K, L69S, G102S and W93Y in the VL region sequence;
      [0341] M34I, S65A, H101A, N106S, W112F in the VH region sequence, Q40K, V91A and G102S in the VL region sequence;
      [0342] L45M, D64E, S65A, A81L, H101A, N106T in the VH region sequence, L20I, V381, Q40K, L69E and G102S in the VL region sequence;
      [0343] N30S, L45M, S65A, A81V, H101A, N106T, W112F in the VH region sequence, Q40K, L69S and W93Y in the VL region sequence; and
      [0344] N30S, L45M, D64E, S65A, A81V, H101A, N106S in the VH region sequence, Q40K and L69S in the VL region sequence;
   [0345] ii. D64E, S65A, A81V, H101N, G102E, F104I, N106T in the VH region sequence (SEQ ID NO: 854), L20I, L69S, and G102S in the VL region sequence (SEQ ID NO: 855);
      [0346] S65A, A81V, H101N, G102E, F104I, N106S in the VH region sequence, L20I, L69S, and G102S in the VL region sequence;
      [0347] M34I, S65A, V99A, H101A, N106T in the VH region sequence, Q40K, V91A and G102S in the VL region sequence; and
      [0348] N30S, Q39E, D64E, S65A, A81V, H101A, G102E, F104I, N106T in the VH region sequence, L20M, Q40K and L69E in the VL region sequence;
   [0349] iii. H101A in the VH region sequence;
   [0350] iv. A81V, V99A_in the VH region sequence, L20I, Q40K, L69S and G102S in the VL region sequence;
      [0351] M34I,_A81V in the VH region sequence (SEQ ID NO: 774),_L20I,_Q40K and_G102S in the VL region sequence (SEQ ID NO: 775);
      [0352] M34I in the VH region sequence (SEQ ID NO: 780), L20I,_Q40K_and G102S in the VL region sequence (781);
      [0353] M34I,_Q39E,_A81V in the VH region sequence (SEQ ID NO: 782), L20I,_Q40K and_G102S in the VL region sequence (SEQ ID NO: 783);
   [0354] v. M34I,_A81V in the VH region sequence (SEQ ID NO: 776), and Q40K in the VL region sequence (SEQ ID NO: 777);
      [0355] L45M in the VH region sequence (SEQ ID NO: 742),_L20I,_Q40K and_G102S in the VH region sequence (SEQ ID NO: 743);
      [0356] M34I,_S65A,_H101A and_N106S in the VH region sequence;
      [0357] L20I,_Q40K,_L69S and_G102S in the VL region sequence;
      [0358] M34F_and A81V in the VH region sequence (SEQ ID NO: 760);
      [0359] L45M in the VH region sequence (SEQ ID NO: 746), Q40K and_G102S in the VL region sequence (SEQ ID NO: 747);
      [0360] Q39D in the VH region sequence (SEQ ID NO: 794), L20I,_Q40K and G102S in the VL region sequence (SEQ ID NO: 795);
      [0361] M34I_and A81V in the VH region sequence (SEQ ID NO: 772);
      [0362] Q39E in the VH region sequence (SEQ ID NO:_808), L20I,_Q40K and_G102S in the VL region sequence (SEQ ID NO: 809);
      [0363] L45M in the VH region sequence (SEQ ID NO:_744)_and_Q40K in the VI region sequence (SEQ ID NO: 745);
      [0364] M34I,_S65A,_A81V,_V99A,_H101A_and N106S in the VH region sequence; or
   [0365] vi. Q39D in the VH region sequence (SEQ ID NO: 796),_L20I,_Q40R and_G102S in the VL region sequence (SEQ ID NO: 797);
      [0366] M34I in the VH region sequence (SEQ ID NO: 768);
      [0367] Q40K in the VL region sequence (SEQ ID NO: 891);
      [0368] Q39D_in the VH region sequence (SEQ ID NO: 800), Q40K and_G102S in the VL region sequence (SEQ ID NO: 801);
      [0369] L20I and_G102S in the VH region sequence;
      [0370] Q39K in the VH region sequence (SEQ ID NO: 820);
      [0371] Q39E in the VH region sequence (SEQ ID NO: 814),_Q40K_and G102S in the VL region sequence (SEQ ID NO: 815);
      [0372] Q39E in the VH region sequence (SEQ ID NO: 810),_L20I,_Q40R_and G102S in the VL region sequence (SEQ ID NO: 811);
      [0373] Q39D_in the VH region sequence (SEQ ID NO: 804),_Q40R_and G102S in the VL region sequence (SEQ ID NO: 805);
      [0374] A81V in the VH region sequence (SEQ ID NO: 738);
      [0375] Q39D in the VH region sequence (SEQ ID NO: 798) and_Q40K in the VL region sequence (SEQ ID NO: 799);
      [0376] W112F in the VH region sequence (SEQ ID NO: 834);
      [0377] W112F in the VH region sequence (SEQ ID NO: 836) and_V381 in the VL region sequence (SEQ ID NO: 837);
      [0378] Q39E in the VH region sequence (SEQ ID NO: 812)_and_Q40K in the VL region sequence (SEQ ID NO: 813);
      [0379] M34V in the VH region sequence (SEQ ID NO: 790)
[0380] c) the VH region comprises or consist of the sequence as defined in SEQ ID NO: 1664 and the VL region comprises or consists of the sequence as defined in SEQ ID NO: 1665; and wherein the VH and/or VL region sequence comprise the amino acid substitution(s) selected from:
   [0381] i. M34I, S65A, A81V, V99A, H101A, N106S in the VH region sequence (resulting VH sequence as defined in SEQ ID NO: 1780), L20I, Q40K, L69S, and G102S in the VL region sequence (resulting VL sequence as defined in SEQ ID NO: 1781);
      [0382] L45M, S65A, A81L, H101A, N106T in the VH region sequence (SEQ ID NO: 1804), L20I, Q40K, L69S, and G102S in the VL region sequence (SEQ ID NO: 1805);
      [0383] L45M, S65A, A81L, H101A, N106S, W112F in the VH region sequence (SEQ ID NO: 1796), L20I, V381, Q40K, L69E, G102S and W93Y in the VL region sequence (SEQ ID NO: 1797);
      [0384] M34I, Q39E, S65A, H101N, G102A, N106T, W112F in the VH region sequence (SEQ ID NO: 1812), Q40K and G102S in the VL region sequence (SEQ ID NO: 1813);
      [0385] M34I, D64E, S65A, V99A, H101A, N106T in the VH region sequence, Q40K and G102S in the VL region sequence;
      [0386] M34I, S65A, A81V, V99A, H101A, G102E, F104I, N106T in the VH region sequence, L20I, Q40K, L69S, and G102S in the VL region sequence; D64E, S65A, D68G, A81V, H101A, N106S in the VH region sequence, L20I, L69S, and G102S in the VL region sequence;
      [0387] M34I, D64E, S65A, H101A, N106T, W112F in the VH region sequence, Q40K and G102S in the VL region sequence;
      [0388] M34I, D64E, S65A, H101A, N106S, W112F in the VH region sequence, Q40K and G102S in the VL region sequence;
      [0389] M34I, D64E, S65A, A81V, V99A, H101A, N106S in the VH region sequence, L20I, Q40K, L69S, G102S and W93Y in the VL region sequence;
      [0390] M34I, S65A, H101A, N106S, W112F in the VH region sequence, Q40K and G102S in the VL region sequence;
      [0391] L45M, D64E, S65A, A81L, H101A, N106T in the VH region sequence, L20I, V381, Q40K, L69E and G102S in the VL region sequence;
      [0392] N30S, L45M, S65A, D68G, A81V, H101A, N106T, W112F in the VH region sequence, Q40K, L69S and W93Y in the VL region sequence; and
      [0393] N30S, L45M, D64E, S65A, D68G, A81V, H101A, N106S in the VH region sequence, Q40K and L69S in the VL region sequence;
   [0394] ii. D64E, S65A, D68G, A81V, H101N, G102E, F104I, N106T in the VH region sequence (SEQ ID NO: 1788), L20I, L69S, and G102S in the VL region sequence (SEQ ID NO: 1789);
      [0395] S65A, D68G, A81V, H101N, G102E, F104I, N106S in the VH region sequence, L20I, L69S, and G102S in the VL region sequence;
      [0396] M34I, S65A, V99A, H101A, N106T in the VH region sequence, Q40K and G102S in the VL region sequence; and
      [0397] N30S, Q39E, D64E, S65A, A81V, H101A, G102E, F104I, N106T in the VH region sequence, L20M, Q40K and L69E in the VL region sequence;
   [0398] iii. H101A in the VH region sequence;
   [0399] iv. A81V, V99A_in the VH region sequence, L20I, Q40K, L69S and G102S in the VL region sequence;
      [0400] M34I,_A81V in the VH region sequence (SEQ ID NO: 1708),_L20I,_Q40K and_G102S in the VL region sequence (SEQ ID NO: 1709);
      [0401] M34I in the VH region sequence (SEQ ID NO: 1714), L20I,_Q40K_and G102S in the VL region sequence (1715);
      [0402] M34I,_Q39E,_A81V in the VH region sequence (SEQ ID NO: 1716), L20I,_Q40K and_G102S in the VL region sequence (SEQ ID NO: 1717);
   [0403] v. M34I,_A81V in the VH region sequence (SEQ ID NO: 1710), and Q40K in the VL region sequence (SEQ ID NO: 1711);
      [0404] L45M in the VH region sequence (SEQ ID NO: 1676),_L20I,_Q40K and_G102S in the VH region sequence (SEQ ID NO: 1677);
      [0405] M34I,_S65A,_H101A and_N106S in the VH region sequence;
      [0406] L20I,_Q40K,_L69S and_G102S in the VL region sequence;
      [0407] M34F_and A81V in the VH region sequence (SEQ ID NO: 1694);
      [0408] L45M in the VH region sequence (SEQ ID NO: 1680), Q40K and_G102S in the VL region sequence (SEQ ID NO: 1681);
      [0409] Q39D in the VH region sequence (SEQ ID NO: 1728), L20I,_Q40K and G102S in the VL region sequence (SEQ ID NO: 1729);
      [0410] M34I_and A81V in the VH region sequence (SEQ ID NO: 1706);
      [0411] Q39E in the VH region sequence (SEQ ID NO:_1742), L20I,_Q40K and_G102S in the VL region sequence (SEQ ID NO: 1743);
      [0412] L45M in the VH region sequence (SEQ ID NO:_1678)_and_Q40K in the VI region sequence (SEQ ID NO: 1679);
      [0413] M34I,_S65A,_A81V,_V99A,_H101A_and N106S in the VH region sequence; or
   [0414] vi. Q39D in the VH region sequence (SEQ ID NO: 1730),_L20I,_Q40R and_G102S in the VL region sequence (SEQ ID NO: 1731);
      [0415] M34I in the VH region sequence (SEQ ID NO: 1702);
      [0416] Q40K in the VL region sequence (SEQ ID NO: 1755);
      [0417] Q39D_in the VH region sequence (SEQ ID NO: 1734), Q40K and_G102S in the VL region sequence (SEQ ID NO: 1735);
      [0418] L20I and_G102S in the VH region sequence;
      [0419] Q39K in the VH region sequence (SEQ ID NO: 1754);
      [0420] Q39E in the VH regions sequence (SEQ ID NO: 1748),_Q40K_and G102S in the VL region sequence (SEQ ID NO: 1749);
      [0421] Q39E in the VH region sequence (SEQ ID NO: 1744),_L20I,_Q40R_and G102S in the VL region sequence (SEQ ID NO: 1745);
      [0422] Q39D_in the VH region sequence (SEQ ID NO: 1738),_Q40R_and G102S in the VL region sequence (SEQ ID NO: 1739);
      [0423] A81V in the VH region sequence (SEQ ID NO: 1672);
      [0424] Q39D in the VH region sequence (SEQ ID NO: 1732) and_Q40K in the VL region sequence (SEQ ID NO: 1733);
      [0425] W112F in the VH region sequence (SEQ ID NO: 1768);
      [0426] W112F in the VH region sequence (SEQ ID NO: 1770) and_V381 in the VL region sequence (SEQ ID NO: 1771);
      [0427] Q39E in the VH region sequence (SEQ ID NO: 1746)_and_Q40K in the VL region sequence (SEQ ID NO: 1747);
      [0428] M34V in the VH region sequence (SEQ ID NO: 1724); or
[0429] d) the VH region comprises or consist of the sequence as defined in SEQ ID NO: 124 and the VL region comprises or consists of the sequence as defined in SEQ ID NO: 125; and wherein the VH and/or VL region sequence comprise the amino acid substitution(s) selected from:
   [0430] i. Q65A, A81V, V99A, H101A, N106S in the VH region sequence (resulting VH sequence as defined in SEQ ID NO: 132), L20I, Q40K, L69S, and G102S in the VL region sequence (resulting VL sequence as defined in SEQ ID NO: 133);
      [0431] L45M, Q65A, A81L, H101A, N106T in the VH region sequence (SEQ ID NO: 156), L20I, Q40K, L69S, and G102S in the VL region sequence (SEQ ID NO: 157);
      [0432] L45M, Q65A, A81L, H101A, N106S, W112F in the VH region sequence (SEQ ID NO: 148), L20I, V381, Q40K, L69E, G102S and W93Y in the VL region sequence (SEQ ID NO: 149);
      [0433] Q39E, Q65A, H101N, N106T, W112F in the VH region sequence (SEQ ID NO: 164), Q40K and G102S in the VL region sequence (SEQ ID NO: 165);
      [0434] D64E, Q65A, V99A, H101A, N106T in the VH region sequence, Q40K, T91A and G102S in the VL region sequence;
      [0435] Q65A, A81V, V99A, H101A, A102E, F104I, N106T in the VH region sequence, L20I, Q40K, L69S, and G102S in the VL region sequence;
      [0436] D64E, Q65A, D68G, A81V, H101A, N106S in the VH region sequence, L20I, L69S, and G102S in the VL region sequence;
      [0437] D64E, Q65A, H101A, N106T, W112F in the VH region sequence, Q40K and G102S in the VL region sequence;
      [0438] D64E, Q65A, H101A, N106S, W112F in the VH region sequence, Q40K and G102S in the VL region sequence;
      [0439] D64E, Q65A, A81V, V99A, H101A, N106S in the VH region sequence, L20I, Q40K, L69S, G102S and W93Y in the VL region sequence;
      [0440] Q65A, H101A, N106S, W112F in the VH region sequence, Q40K and G102S in the VL region sequence;
      [0441] L45M, D64E, Q65A, A81L, H101A, N106T in the VH region sequence, L20I, V381, Q40K, L69E and G102S in the VL region sequence;
      [0442] N30S, L45M, Q65A, D68G, A81V, H101A, N106T, W112F in the VH region sequence, Q40K, L69S and W93Y in the VL region sequence; and
      [0443] N30S, L45M, D64E, Q65A, D68G, A81V, H101A, N106S in the VH region sequence, Q40K and L69S in the VL region sequence;
   [0444] ii. D64E, Q65A, D68G, A81V, H101N, A102E, F104I, N106T in the VH region sequence (SEQ ID NO: 140), L20I, L69S, and G102S in the VL region sequence (SEQ ID NO: 141);
      [0445] Q65A, D68G, A81V, H101N, A102E, F104I, N106S in the VH region sequence, L20I, L69S, and G102S in the VL region sequence;
      [0446] Q65A, V99A, H101A, N106T in the VH region sequence, Q40K and G102S in the VL region sequence; and
      [0447] N30S, Q39E, D64E, Q65A, A81V, H101A, A102E, F104I, N106T in the VH region sequence, L20M, Q40K and L69E in the VL region sequence;
   [0448] iii. H101A in the VH region sequence;
   [0449] iv. A81V, V99A_in the VH region sequence, L20I, Q40K, L69S and G102S in the VL region sequence;
      [0450] A81V in the VH region sequence,_L20I,_Q40K and_G102S in the VL region sequence;
      [0451] L20I,_Q40K_and G102S in the VL region sequence;
      [0452] Q39E,_A81V in the VH region sequence, L20I,_Q40K and_G102S in the VL region sequence;
   [0453] v. A81V in the VH region sequence, and Q40K in the VL region sequence;
      [0454] L45M in the VH region sequence,_L20I,_Q40K and_G102S in the VH region sequence;
      [0455] Q65A,_H101A and_N106S in the VH region sequence;
      [0456] L20I,_Q40K,_L69S and_G102S in the VL region sequence; 134F_and A81V in the VH region sequence;
      [0457] L45M in the VH region sequence, Q40K and_G102S in the VL region sequence;
      [0458] Q39D in the VH region sequence, L20I,_Q40K and G102S in the VL region sequence;
      [0459] Q39E in the VH region sequence, L20I,_Q40K and_G102S in the VL region sequence;
      [0460] L45M in the VH region sequence_and_Q40K in the VL region sequence; Q65A,_A81V,_V99A,_H101A_and N106S in the VH region sequence; or
   [0461] vi. Q39D in the VH region sequence,_L20I,_Q40R and_G102S in the VL region sequence;
      [0462] Q40K in the VL region sequence;
      [0463] Q39D_in the VH region sequence, Q40K and_G102S in the VL region sequence;
      [0464] L20I and_G102S in the VH region sequence;
      [0465] Q39K in the VH region sequence;
      [0466] Q39E in the VH region sequence,_Q40K_and G102S in the VL region sequence;
      [0467] Q39E in the VH region sequence,_L20I,_Q40R_and G102S in the VL region sequence;
      [0468] Q39D_in the VH region sequence,_Q40R_and G102S in the VL region sequence);
      [0469] A81V in the VH region sequence;
      [0470] Q39D in the VH region sequence and_Q40K in the VL region sequence;
      [0471] W112F in the VH region sequence;
      [0472] W112F in the VH region sequence and_V381 in the VL region sequence;
      [0473] Q39E in the VH region sequence_and_Q40K in the VL region sequence;
      [0474] M34V in the VH region sequence.
         The alternatives a) to c) are preferred, more preferred is the alternative a) as recited above as CD3epsilon binding domain of the polypeptide or polypeptide construct of the invention. The above recited preferred linkers are also preferred for this embodiment, i.e (G₄S)₃ or G₄Q)3.

[0475] In accordance with the invention, the polypeptide or polypeptide construct the invention may have linkers, half-life extending peptides, and other structural moieties as disclosed in SEQ ID NOs: 1 to 19 and 2551. Details on nature and functions of these structures are found in the sequence table disclosed herein.

[0476] The invention provides an embodiment wherein the polypeptide construct is in a format selected from the group consisting of scFv, and to the extent that a further binding domain is present (scFv)2, diabodies and oligomers of any of the aforementioned formats. The term “is in a format” does not exclude that the construct can be further modified, e.g. by attachment or fusion to other moieties, as described herein. According to one embodiment of the polypeptide construct of the present invention, the domains comprising the herein described paratopes are in the format of an scFv. In an scFv, the VH region and the and VL region are arranged in the order VH-VL or VL-VH (from N- to C-terminus). It is envisaged that the VH and the VL regions of the domain(s) are connected via a linker, preferably a peptide linker. In a preferred embodiment, the peptide linker is a G₄S, or G₄Q linker or repetitions thereof, such as preferably (G₄S)3 (i.e. three repetitions of G₄S), or (G₄Q)3 (i.e. three repetitions of G₄Q). According to one embodiment of the binding domain(s) comprising the herein described VH and the VL regions, the VH-region is positioned N-terminally of the linker, and the VL-region is positioned C-terminally of the linker. In other words, in one embodiment of the domains comprising the herein described paratopes, the scFv comprises from the N-terminus to the C-terminus: VH-linker-VL. It is furthermore envisaged that binding domain(s) (comprising the herein described paratopes) of the construct, in case the polypeptide or polypeptide construct comprises at least one further binding domain in addition to said CD3 epsilon binding domain, are connected via a linker, preferably a peptide linker. The construct may e.g. comprise the domains in the order (from N-terminus to C-terminus) CD3 binding domain-linker-further binding domain. The inverse order (further binding domain(s)-linker-CD3 binding domain) is also possible and is the preferred orientation.

[0477] The linkers are preferably peptide linkers, more preferably short peptide linkers. In accordance with the present invention, a “peptide linker” comprises an amino acid sequence which connects the amino acid sequences of one domain with another (variable and/or binding) domain (e.g. a variable domain or a binding domain) of the construct. An essential technical feature of such peptide linker is that it does not comprise any polymerization activity. Among the suitable peptide linkers are those described in U.S. Pat. Nos. 4,751,180 and 4,935,233 or WO 88/09344. The peptide linkers can also be used to attach other domains or modules or regions (such as half-life extending domains) to the construct of the invention. Examples of useful peptide linkers are shown in SEQ ID NOs: 1 to 11 and 2551. In the present context, a “short” linker has between 2 and 50 amino acids, preferably between 3 and 35, between 4 and 30, between 5 and 25, between 6 and 20, or between 6 and 17 amino acids. The linker between two variable regions of one binding domain may have a different length (e.g. may be longer) than the linker between the two binding domains. For example, the linker between two variable regions of one binding domain may have a length between 7 and 15 amino acids, preferably between 9 and 13, and the linker between the two binding domains may have a length between 3 and 10 amino acids, preferably between 4 and 8. It is further envisaged that the peptide linkers are glycine/serine linkers, such as those depicted in SEQ ID NOs: 1 to 11 and 2551. Most of the amino acids in glycine/serine linkers are selected from glycine and serine.

[0478] If a linker is used, this linker is preferably of a length and sequence to ensure that each of the first and second domains can, independently from one another, retain their differential binding specificities. For peptide linkers which connect the at least two binding domains (or the two variable regions forming one binding domain) in the construct, those peptide linkers are envisaged which comprise only a few amino acid residues, e.g. 12 amino acid residues or less. Thus, peptide linkers of 12, 11, 10, 9, 8, 7, 6 or 5 amino acid residues are preferred. An envisaged peptide linker with less than 5 amino acids comprises 4, 3, 2 or one amino acid(s), wherein Gly-rich linkers are preferred. A “single amino acid” linker in the context of said “peptide linker” is Gly. Another embodiment of a peptide linker is characterized by the amino acid sequence Gly-Gly-Gly-Gly-Ser, i.e. Gly4Ser (SEQ ID NO: 15), or polymers thereof, i.e. (Gly4Ser)x, where x is an integer of 1 or greater (e.g. 2 or 3), for example SEQ ID NOs: 1 and 2. Preferred linkers are depicted in SEQ ID NOs: 2, 4, 5, 6, 8, 10, 11, and 2551. Another preferred linker comprises or consists of (Gly4Ser)6. The characteristics of said peptide linkers are known in the art and are described e.g. in Dall'Acqua et al. (Biochem. (1998) 37, 9266-9273), Cheadle et al. (Mol Immunol (1992) 29, 21-30) and Raag and Whitlow (FASEB (1995) 9(1), 73-80). Peptide linkers which do not promote any secondary structures are preferred. The linkage of said domains to each other can be provided, e.g., by genetic engineering. Methods for preparing fused and operatively linked bispecific single chain constructs and expressing them in mammalian cells or bacteria are well-known in the art (e.g. WO 99/54440 or Sambrook et al., Molecular Cloning: A Laboratory Manual, Cold Spring Harbor Laboratory Press, Cold Spring Harbor, New York, 2001). More preferred, said peptide linker is a G₄S, or G₄Q linker or repetitions thereof, such as (G₄S)3 or (G₄Q)3.

[0479] According to one embodiment of the invention, the polypeptide construct of the invention is a “single chain construct” or “single chain polypeptide”. In the case of a further binding domain, it is also envisaged that either the CD3 binding or the further (also termed “second”) or both binding domains may be in the format of a “single chain Fv” (scFv). Although the two domains of the Fv fragment, VL and VH, are coded for by separate genes, they can be joined, using recombinant methods, by an artificial linker—as described hereinbefore—that enables them to be made as a single protein chain in which the VL and VH regions pair to form a monovalent molecule; see e.g., Huston et al. (1988) Proc. Natl. Acad. Sci USA 85:5879-5883). These antibody fragments are obtained using conventional techniques known to those with skill in the art, and the fragments are evaluated for function in the same manner as are full-length antibodies or IgGs. A single-chain variable fragment (scFv) is hence a fusion protein of the variable region of the heavy chain (VH) and of the light chain (VL) of immunoglobulins, usually connected with a short linker peptide. The linker is usually rich in glycine for flexibility, as well as serine or also threonine for solubility, and can either connect the N-terminus of the VH with the C-terminus of the VL, or vice versa. This protein retains the specificity of the original immunoglobulin, despite removal of the constant regions and introduction of the linker.

[0480] Bispecific single chain molecules are known in the art and are described in WO 99/54440, Mack, J. Immunol. (1997), 158, 3965-3970, Mack, PNAS, (1995), 92, 7021-7025, Kufer, Cancer Immunol. Immunother., (1997), 45, 193-197, Löffler, Blood, (2000), 95, 6, 2098-2103, Brühl, Immunol., (2001), 166, 2420-2426, Kipriyanov, J. Mol. Biol., (1999), 293, 41-56. Techniques described for producing single chain constructs (see, inter alia, U.S. Pat. No. 4,946,778, Kontermann and Dübel (2010), loc. cit. and Little (2009), loc. cit.) can be adapted to produce single chain constructs selectively and, preferably, specifically recognizing (an) elected target(s).

[0481] Bivalent (also called divalent) or bispecific single-chain variable fragments (bi-scFvs or di-scFvs) having the format (scFv)2 can be engineered by linking two scFv molecules (e.g. with linkers as described hereinbefore). The linking can be done by producing a single polypeptide chain with two VH regions and two VL regions, yielding tandem scFvs (see e.g. Kufer, P. et al., (2004) Trends in Biotechnology 22(5):238-244). Another possibility is the creation of scFv molecules with linker peptides that are too short for the two variable regions to fold together (e.g. about five amino acids), forcing the scFvs to dimerize. In this case, the VH and the VL of a binding domain (binding either to CD3epsilon or the further target antigen) are not directly connected via a peptide linker. Thus, the VH of the CD3 binding domain may e.g. be fused to the VL of the further target antigen binding domain via a peptide linker, and the VH of the further target antigen binding domain is fused to the VL of the CD3 binding domain via such peptide linker. This type is known as diabodies (see e.g. Hollinger, Philipp et al., (July 1993) Proceedings of the National Academy of Sciences of the United States of America 90 (14): 6444-8.).

[0482] In accordance with the invention, the polypeptide or polypeptide construct the invention comprises at least one further binding domain. In other words, the polypeptide or polypeptide construct comprises the CD3epsilon binding domain defined herein above and at least one further binding domain. Said further binding domain can be a further CD3 binding domain, preferably one as defined herein. As such, the polypeptide can comprise two of the same CD3 binding domains as defined herein. Alternatively or additionally (in a construct comprising at least three binding domains), the at least one further binding domain binds to a different target, such as a cell surface antigen.

[0483] Preferably, said at least one further binding domain binds to a cell surface antigen. The term “cell surface antigen” as used herein denotes a molecule, which is displayed on the surface of a cell. In most cases, this molecule will be located in or on the plasma membrane of the cell such that at least part of this molecule remains accessible from outside the cell in tertiary form. A non-limiting example of a cell surface molecule, which is located in the plasma membrane is a transmembrane protein comprising, in its tertiary conformation, regions of hydrophilicity and hydrophobicity. Here, at least one hydrophobic region allows the cell surface molecule to be embedded, or inserted in the hydrophobic plasma membrane of the cell while the hydrophilic regions extend on either side of the plasma membrane into the cytoplasm and extracellular space, respectively. It will be appreciated that an extracellular epitope refers to an epitope comprised by a portion of a protein that is disposed in the extracellular space, for example a portion of a cell surface molecule that extends into the extracellular space when that cell surface molecule is a native configuration disposed, embedded, or inserted in the plasma membrane. Non-limiting examples of cell surface molecules which are located on the plasma membrane are proteins which have been modified at a cysteine residue to bear a palmitoyl group, proteins modified at a C-terminal cysteine residue to bear a farnesyl group or proteins which have been modified at the C-terminus to bear a glycosyl phosphatidyl inositol (“GPI”) anchor.

[0484] Said cell surface antigen is preferably a tumor antigen. The term “tumor antigen” as used herein may be understood as those antigens that are presented on tumor cells. These antigens can be presented on the cell surface with an extracellular part, which is often combined with a transmembrane and cytoplasmic part of the molecule. These antigens can sometimes be presented only by tumor cells and never by the normal ones. Tumor antigens can be exclusively expressed on tumor cells or might represent a tumor specific mutation compared to normal cells. In this case, they are called tumor-specific antigens. More common are antigens that are presented by tumor cells and normal cells, and they are called tumor-associated antigens. These tumor-associated antigens can be overexpressed compared to normal cells or are accessible for antibody binding in tumor cells due to the less compact structure of the tumor tissue compared to normal tissue.

[0485] In a preferred embodiment, the tumor antigen is selected from the group consisting of BCMA (B-cell maturation antigen), CD123 (interleukin-3 receptor alpha chain (IL-3R)), CD19 (B-lymphocyte antigen CD19), CD20 (B-lymphocyte antigen CD20), CD22 (cluster of differentiation-22), CD33 (Siglec-3), CD70 (Cluster of Differentiation 70), CDH19 (Cadherin 19), CDH3 (Cadherin 3), CLL1 (C-type lectin domain family 12 member A), CS1 (CCND3 subset 1), CLDN6 (Claudin-6), CLDN18.2 (Claudin 18.2), DLL3 (Delta-like ligand 3), EGFRvII (Epidermal growth factor receptor vIII), FLT3 (fms like tyrosine kinase 3), MAGEB2 (Melanoma-associated antigen B2), MART1 (Melanoma Antigen Recognized By T-Cells 1), MSLN (Mesothelin), MUC17 (Mucin-17), PSMA (prostate-specific membrane antigen), and STEAP1 (Metalloreductase STEAP1). These tumor antigens are well known in the art due to their expression on tumor cells.

[0486] Preferred CDR sequences and VH/VL region sequences for BCMA binding domains as further binding domains of the polypeptide or polypeptide construct of the invention, and bispecific single chain molecule sequences of a polypeptide or polypeptide construct in accordance with the invention having a BCMA binding domain as further binding domain (with and without half-life extending domain) are defined in SEQ ID NOs: 2072 to 2095.

[0487] Preferred CDR sequences and VH/VL region sequences for CD123 binding domains as further binding domains of the polypeptide or polypeptide construct of the invention, and bispecific single chain molecule sequences of a polypeptide or polypeptide construct in accordance with the invention having a CD123 binding domain as further binding domain (with and without half-life extending domain) are defined in SEQ ID NOs: 2096 to 2110.

[0488] Preferred CDR sequences and VH/VL region sequences for CD19 binding domains as further binding domains of the polypeptide or polypeptide construct of the invention, and bispecific single chain molecule sequences of a polypeptide or polypeptide construct in accordance with the invention having a CD19 binding domain as further binding domain (with and without half-life extending domain) are defined in SEQ ID NOs: 2111 to 2125.

[0489] Preferred CDR sequences and VH/VL region sequences for CD20 binding domains as further binding domains of the polypeptide or polypeptide construct of the invention, and bispecific single chain molecule sequences of a polypeptide or polypeptide construct in accordance with the invention having a CD20 binding domain as further binding domain (with and without half-life extending domain) are defined in SEQ ID NOs: 2126 to 2140.

[0490] Preferred CDR sequences and VH/VL region sequences for CD22 binding domains as further binding domains of the polypeptide or polypeptide construct of the invention, and bispecific single chain molecule sequences of a polypeptide or polypeptide construct in accordance with the invention having a CD22 binding domain as further binding domain (with and without half-life extending domain) are defined in SEQ ID NOs: 2141 to 2154.

[0491] Preferred CDR sequences and VH/VL region sequences for CD33 binding domains as further binding domains of the polypeptide or polypeptide construct of the invention, and bispecific single chain molecule sequences of a polypeptide or polypeptide construct in accordance with the invention having a CD33 binding domain as further binding domain (with and without half-life extending domain) are defined in SEQ ID NOs: 2155 to 2178.

[0492] Preferred CDR sequences and VH/VL region sequences for CD70 binding domains as further binding domains of the polypeptide or polypeptide construct of the invention, and bispecific single chain molecule sequences of a polypeptide or polypeptide construct in accordance with the invention having a CD70 binding domain as further binding domain (with and without half-life extending domain) are defined in SEQ ID NOs: 2179 to 2192.

[0493] Preferred CDR sequences and VH/VL region sequences for CDH19 binding domains as further binding domains of the polypeptide or polypeptide construct of the invention, and bispecific single chain molecule sequences of a polypeptide or polypeptide construct in accordance with the invention having a CDH19 binding domain as further binding domain (with and without half-life extending domain) are defined in SEQ ID NOs: 2193 to 2212.

[0494] Preferred CDR sequences and VH/VL region sequences for CDH3 binding domains as further binding domains of the polypeptide or polypeptide construct of the invention, and bispecific single chain molecule sequences of a polypeptide or polypeptide construct in accordance with the invention having a CDH3 binding domain as further binding domain (with and without half-life extending domain) are defined in SEQ ID NOs: 2213 to 2256.

[0495] Preferred CDR sequences and VH/VL region sequences for CLL1 binding domains as further binding domains of the polypeptide or polypeptide construct of the invention, and bispecific single chain molecule sequences of a polypeptide or polypeptide construct in accordance with the invention having a CLL1 binding domain as further binding domain (with and without half-life extending domain) are defined in SEQ ID NOs: 2257 to 2271.

[0496] Preferred CDR sequences and VH/VL region sequences for CS1 binding domains as further binding domains of the polypeptide or polypeptide construct of the invention, and bispecific single chain molecule sequences of a polypeptide or polypeptide construct in accordance with the invention having a CS1 binding domain as further binding domain (with and without half-life extending domain) are defined in SEQ ID NOs: 2272 to 2285.

[0497] Preferred CDR sequences and VH/VL region sequences for CLDN6 binding domains as further binding domains of the polypeptide or polypeptide construct of the invention, and bispecific single chain molecule sequences of a polypeptide or polypeptide construct in accordance with the invention having a CLDN6 binding domain as further binding domain (with and without half-life extending domain) are defined in SEQ ID NOs: 2286 to 2299.

[0498] Preferred CDR sequences and VH/VL region sequences for CLDN18.2 binding domains as further binding domains of the polypeptide or polypeptide construct of the invention, and bispecific single chain molecule sequences of a polypeptide or polypeptide construct in accordance with the invention having a CLDN18.2 binding domain as further binding domain (with and without half-life extending domain) are defined in SEQ ID NOs: 2300 to 2314.

[0499] Preferred CDR sequences and VH/VL region sequences for DLL3 binding domains as further binding domains of the polypeptide or polypeptide construct of the invention, and bispecific single chain molecule sequences of a polypeptide or polypeptide construct in accordance with the invention having a DLL3 binding domain as further binding domain (with and without half-life extending domain) are defined in SEQ ID NOs: 2315 to 2328.

[0500] Preferred CDR sequences and VH/VL region sequences for EGFRvIII binding domains as further binding domains of the polypeptide or polypeptide construct of the invention, and bispecific single chain molecule sequences of a polypeptide or polypeptide construct in accordance with the invention having a EGFRvIII binding domain as further binding domain (with and without half-life extending domain) are defined in SEQ ID NOs: 2329 to 2342.

[0501] Preferred CDR sequences and VH/VL region sequences for FLT3 binding domains as further binding domains of the polypeptide or polypeptide construct of the invention, and bispecific single chain molecule sequences of a polypeptide or polypeptide construct in accordance with the invention having a FLT3 binding domain as further binding domain (with and without half-life extending domain) are defined in SEQ ID NOs: 2343 to 2357.

[0502] Preferred CDR sequences and VH/VL region sequences for MAGEB2 binding domains as further binding domains of the polypeptide or polypeptide construct of the invention, and bispecific single chain molecule sequences of a polypeptide or polypeptide construct in accordance with the invention having a MAGEB2 binding domain as further binding domain (with and without half-life extending domain) are defined in SEQ ID NOs: 2358 to 2378.

[0503] Preferred CDR sequences and VH/VL region sequences for MART1 binding domains as further binding domains of the polypeptide or polypeptide construct of the invention are defined in SEQ ID NOs: 2379 to 2387.

[0504] Preferred CDR sequences and VH/VL region sequences for MSLN binding domains as further binding domains of the polypeptide or polypeptide construct of the invention, and bispecific single chain molecule sequences of a polypeptide or polypeptide construct in accordance with the invention having a MSLN binding domain as further binding domain (with and without half-life extending domain) are defined in SEQ ID NOs: 2388 to 2431.

[0505] Preferred CDR sequences and VH/VL region sequences for MUC17 binding domains as further binding domains of the polypeptide or polypeptide construct of the invention, and bispecific single chain molecule sequences of a polypeptide or polypeptide construct in accordance with the invention having a MUC17 binding domain as further binding domain (with and without half-life extending domain) are defined in SEQ ID NOs: 2432 to 2445.

[0506] Preferred CDR sequences and VH/VL region sequences for PSMA binding domains as further binding domains of the polypeptide or polypeptide construct of the invention, and bispecific single chain molecule sequences of a polypeptide or polypeptide construct in accordance with the invention having a PSMA binding domain as further binding domain (with and without half-life extending domain) are defined in SEQ ID NOs: 2446 to 2475.

[0507] Preferred bispecific single chain molecule sequences of a polypeptide or polypeptide construct in accordance with the invention having CD20 and CD22 binding domains as further binding domains (with and without a further CD3 binding domain as defined herein) and a half-life extending domain are defined in SEQ ID NOs: 2505 to 2516.

[0508] Preferred bispecific single chain molecule sequences of a polypeptide or polypeptide construct in accordance with the invention having CS1 and BCMA binding domains as further binding domains and a half-life extending domain are defined in SEQ ID NOs: 2517 to 2522.

[0509] Preferred bispecific single chain molecule sequences of a polypeptide or polypeptide construct in accordance with the invention having MSLN and CDH3 binding domains as further binding domains and a half-life extending domain are defined in SEQ ID NOs: 2529 to 2536.

[0510] As laid out herein above, the polypeptide construct of the invention comprises a binding domain which binds to CD3 on the surface of a T cell. “CD3” (cluster of differentiation 3) is a T cell co-receptor composed of four chains. In mammals, the CD3 protein complex contains a CD3γ (gamma) chain, a CD3δ (delta) chain, and two CD3ε (epsilon) chains. These four chains associate with the T cell receptor (TCR) and the so-called ((zeta) chain to for the “T cell receptor complex” and to generate an activation signal in T lymphocytes. The CD3γ (gamma), CD3δ (delta), and CD3ε (epsilon) chains are highly related cell-surface proteins of the immunoglobulin superfamily and each contain a single extracellular immunoglobulin domain. The intracellular tails of the CD3 molecules contain a single conserved motif known as an immunoreceptor tyrosine-based activation motif (ITAM), which is essential for the signaling capacity of the TCR. The CD3 epsilon molecule is a polypeptide which in humans is encoded by the CD3 epsilon gene which resides on chromosome 11. In the context of the present invention, CD3 is understood as a protein complex and T cell co-receptor that is involved in activating both the cytotoxic T cell (CD8+ naive T cells) and T helper cells (CD4+ naive T cells). It is typically composed of four distinct chains. Especially in mammals, the complex contains a CD3γ chain, a CD3δ chain, and two CD3ε chains. These chains associate with the T-cell receptor (TCR) and the ζ-chain (zeta-chain) to generate an activation signal in T lymphocytes. The TCR, ζ-chain, and CD3 molecules together constitute the TCR complex.

[0511] The redirected lysis of target cells via the recruitment of T cells by a construct which binds to CD3 on the T cell and to a target protein on the target cell generally involves cytolytic synapse formation and delivery of perforin and granzymes. The engaged T cells are capable of serial target cell lysis and are not affected by immune escape mechanisms interfering with peptide antigen processing and presentation, or clonal T cell differentiation; see e.g. WO 2007/042261.

[0512] Cytotoxicity mediated by given tumor antigen×CD3 constructs can be measured in various ways. The “half maximal effective concentration” (EC50) is commonly used as a measure of potency of a biologically active molecule such as a construct of the present invention. It may be expressed in molar units. In the present case of measuring cytotoxicity, the EC50 value refers to the concentration of a construct inducing a cytotoxic response (lysis of target cells) halfway between the baseline and the maximum. Effector cells in a cytotoxicity assay can e.g. be stimulated enriched (human) CD8 positive T cells or unstimulated (human) peripheral blood mononuclear cells (PBMC). An EC50 value may typically be expected to be lower when stimulated/enriched CD8+ T cells are used as effector cells, compared with unstimulated PBMC. If the target cells are of macaque origin or express or are transfected with a given macaque tumor antigen, the effector cells should also be of macaque origin, such as a macaque T cell line, e.g. 4119LnPx. The target cells should express said tumor antigen on the cell surface. Target cells can be a cell line (such as CHO) which is stably or transiently transfected with said tumor antigen. Alternatively, the target cells can be a tumor antigen positive natural expresser cell line, such as the human cancer lines. Usually EC50 values are expected to be lower when using target cells that express higher levels of said tumor antigen on the cell surface compared with target cells having a lower target expression rate.

[0513] The effector to target cell (E:T) ratio in a cytotoxicity assay is usually about 10:1, but can also vary. Cytotoxic activity of tumor antigen×CD3 constructs can be measured in a 51-chromium release assay (e.g. with an incubation time of about 18 hours) or in a in a FACS-based cytotoxicity assay (e.g. with an incubation time of about 48 hours). Modifications of the incubation time (cytotoxic reaction) are also envisaged. Other methods of measuring cytotoxicity are well-known and comprise MTT or MTS assays, ATP-based assays including bioluminescent assays, the sulforhodamine B (SRB) assay, WST assay, clonogenic assay and the ECIS technology.

[0514] According to one embodiment, the cytotoxic activity mediated by tumor antigen×CD3 constructs of the present invention is measured in a cell-based cytotoxicity assay. It may also be measured in a 51-chromium release assay. It is envisaged that the EC50 value of the constructs of the invention is ≤300 pM, ≤280 pM, ≤260 pM, ≤250 pM, ≤240 pM, ≤220 pM, ≤200 pM, ≤180 pM, ≤160 pM, ≤150 pM, ≤140 pM, ≤120 pM, ≤100 pM, ≤90 pM, ≤80 pM, ≤70 pM, ≤60 pM, ≤50 pM, ≤40 pM, ≤30 pM, ≤20 pM, ≤15 pM, ≤10 pM, or ≤5 pM.

[0515] The above given EC50 values can be measured in different assays and under different conditions. For example, when human PBMCs are used as effector cells and tumor antigen transfected cells such as CHO cells are used as target cells, it is envisaged that the EC50 value of the tumor antigen×CD3 construct is ≤500 pM, ≤400 pM, ≤300 pM, ≤280 pM, ≤260 pM, ≤250 pM, ≤240 pM, ≤220 pM, ≤200 pM, ≤180 pM, ≤160 pM, ≤150 pM, ≤140 pM, ≤120 pM, ≤100 pM, ≤90 pM, ≤80 pM, ≤70 pM, ≤60 pM, ≤50 pM, ≤40 pM, ≤30 pM, ≤20 pM, ≤15 pM, ≤10 pM, or 55 pM. When human PBMCs are used as effector cells and when the target cells are a CLDN6 positive cell line such as, it is envisaged that the EC50 value of the CLDN6×CD3 construct is ≤300 pM, ≤280 pM, ≤260 pM, ≤250 pM, ≤240 pM, ≤220 pM, ≤200 pM, ≤180 pM, ≤160 pM, ≤150 pM, ≤140 pM, ≤120 pM, ≤100 pM, ≤90 pM, ≤80 pM, ≤70 pM, ≤60 pM, ≤50 pM, ≤40 pM, ≤30 pM, ≤20 pM, ≤15 pM, ≤10 pM, or ≤5 pM.

[0516] According to one embodiment, the tumor antigen×CD3 polypeptides/polypeptide constructs of the present invention do not induce/mediate lysis or do not essentially induce/mediate lysis of cells that do not express said given tumor antigen on their surface (tumor antigen negative cells), such as CHO cells. The term “do not induce lysis”, “do not essentially induce lysis”, “do not mediate lysis” or “do not essentially mediate lysis” means that a construct of the present invention does not induce or mediate lysis of more than 30%, preferably not more than 20%, more preferably not more than 10%, particularly preferably not more than 9%, 8%, 7%, 6% or 5% of tumor antigen negative cells, whereby lysis of tumor antigen expressing target cells (such as cells transformed or transfected with said tumor antigen or a natural expresser cell line such as the human cancer lines) is set to be 100%. This usually applies for concentrations of the construct of up to 500 nM. Cell lysis measurement is a routine technique. Moreover, the present specification teaches specific instructions how to measure cell lysis.

[0517] The difference in cytotoxic activity between the monomeric and the dimeric isoform of individual tumor antigen×CD3 polypeptides/polypeptide constructs is referred to as “potency gap”. This potency gap can e.g. be calculated as ratio between EC50 values of the molecule's monomeric and dimeric form. In one method to determine this gap, an 18 hour 51-chromium release assay or a 48h FACS-based cytotoxicity assay is carried out as described hereinbelow with purified construct monomer and dimer. Effector cells are stimulated enriched human CD8+ T cells or unstimulated human PBMC. Target cells are hu tumor antigen transfected CHO cells. Effector to target cell (E:T) ratio is 10:1. Potency gaps of the tumor antigen×CD3 constructs of the present invention are preferably ≤5, more preferably s 4, even more preferably s 3, even more preferably s 2 and most preferably s 1.

[0518] The binding domain(s) of the polypeptide construct of the invention is/are preferably cross-species specific for members of the mammalian order of primates, such as macaques. According to one embodiment, the further binding domain(s), in addition to binding to a human tumor antigen, will also bind to said tumor antigen of primates including (but not limited to) new world primates (such as Callithrix jacchus, Saguinus Oedipus or Saimiri sciureus), old world primates (such as baboons and macaques), gibbons, orangutans and non-human hominidae. It is envisaged that the domain which binds to human CD3 on the surface of a T cell of the invention also binds at least to macaque CD3. A preferred macaque is Macaca fascicularis. Macaca mulatta (Rhesus) is also envisaged. The polypeptide or polypeptide construct of the invention comprises a domain which binds to human CD3epsilon on the surface of a T cell and at least macaque CD3.

[0519] In one embodiment, the affinity gap of the constructs according to the invention for binding macaque CD3 versus human CD3 [KD ma CD3: KD hu CD3] (as determined e.g. by BiaCore or by Scatchard analysis) is between 0.01 and 100, preferably between 0.1 and 10, more preferably between 0.2 and 5, more preferably between 0.3 and 4, even more preferably between 0.5 and 3 or between 0.5 and 2.5, and most preferably between 0.5 and 1.

[0520] As detailed herein above, said binding domain of the polypeptide or polypeptide construct of the invention binds to human CD3 epsilon (or human CD3 epsilon on the surface of a T cell) and, preferably, to Callithrix jacchus or Saimiri sciureus CD3 epsilon. More specifically, said domain binds to an extracellular epitope of human CD3 epsilon. It is also envisaged that said domain binds to an extracellular epitope of the human and the Macaca CD3 epsilon chain. Said extracellular epitope of CD3 epsilon is comprised within amino acid residues 1-27 of the human CD3 epsilon extracellular domain (see SEQ ID NO: 2552; amino acid residues 1-27 in SEQ ID NO: 2553). Even more particularly, the epitope comprises at least the amino acid sequence Gln-Asp-Gly-Asn-Glu. Callithrix jacchus is a new world primate belonging to the family of Callitrichidae, while Saimiri sciureus is a new world primate belonging to the family of Cebidae.

[0521] In a preferred embodiment, the polypeptide or polypeptide construct of the invention is a single chain polypeptide that is at least bispecific. It is preferred for this embodiment that the CD3 binding domain according to the invention is present as a scFv in the polypeptide or polypeptide construct.

[0522] It is also envisaged that the polypeptide construct of the invention has, in addition to its function to bind to CD3 and, in certain embodiments to bind to at least a further binding domain, a further function. In this format, the construct may be a trifunctional or multifunctional construct by targeting target cells through, preferably, tumor antigen binding, mediating cytotoxic T cell activity through CD3 binding and providing a further function such as means or domains to enhance or extend serum half-life, a fully functional or modified Fc constant domain mediating cytotoxicity through recruitment of effector cells, a label (fluorescent etc.), a therapeutic agent such as a toxin or radionuclide, etc.

[0523] Examples for means or domains to extend serum half-life of the polypeptides/polypeptide constructs of the invention include peptides, proteins or domains of proteins, which are fused or otherwise attached to the polypeptides/polypeptide constructs. The group of peptides, proteins or protein domains includes peptides binding to other proteins with preferred pharmacokinetic profile in the human body such as serum albumin (see WO 2009/127691). An alternative concept of such half-life extending peptides includes peptides binding to the neonatal Fc receptor (FcRn, see WO 2007/098420), which can also be used in the constructs of the present invention. The concept of attaching larger domains of proteins or complete proteins includes the fusion of human serum albumin, variants or mutants of human serum albumin (see WO 2011/051489, WO 2012/059486, WO 2012/150319, WO 2013/135896, WO 2014/072481, WO 2013/075066) or domains thereof, as well as the fusion of an immunoglobulin constant region (Fc domain) and variants thereof. Such variants of Fc domains are called Fc-based domains and may e.g. be optimized/modified to allow the desired pairing of dimers or multimers, to abolish Fc receptor binding (e.g. to avoid ADCC or CDC) or for other reasons. A further concept known in the art to extend the half-life of substances or molecules in the human body is the pegylation of those molecules (such as the constructs of the present invention).

[0524] In one embodiment, the polypeptides/polypeptide constructs according to the invention are linked (e.g. via peptide bond) with a fusion partner (such as a protein, polypeptide or peptide), e.g. for extending the construct's serum half-life. These fusion partners can be selected from human serum albumin (“HSA” or “HALB”) as wells as sequence variants thereof, peptides binding to HSA, peptides binding to FcRn (“FcRn BP”), or constructs comprising an (antibody derived) Fc region. Exemplary sequences of these fusion partners are depicted in SEQ ID NOs: 16, 18 and 19. In general, the fusion partners may be linked to the N-terminus or to the C-terminus of the constructs according to the invention, either directly (e.g. via peptide bond) or through a peptide linker such as (GGGGS)n or (GGGGQ)n (wherein “n” is an integer of 2 or greater, e.g. 2 or 3 or 4). Suitable peptide linkers are discussed above and are shown in SEQ ID NOs: 2 and 2551.

[0525] It is envisaged that a polypeptide construct according to the present invention comprises a single chain polypeptide that is at least bispecific, wherein said polypeptide comprises or consists of in the following order from N-terminus to C-terminus:
[0526] a) VL (comprising part of a cell surface antigen binding domain/paratope)-(G4S)3 or (G4Q)3-VH (comprising part of a cell surface antigen binding domain/paratope)-Peptide linker (SG4S) or (SG4Q)-VH (comprising part of the CD3epsilon binding domain/paratope)-(G4S)3 or (G4Q)3-VL (comprising part of the CD3epsilon binding domain/paratope);
[0527] b) VH (comprising part of a cell surface antigen binding domain/paratope)-(G4S)3 or (G4Q)3-VL (comprising part of a cell surface antigen binding domain/paratope)-Peptide linker (SG4S) or (SG4Q)-VH (comprising part of the CD3epsilon binding domain/paratope)-(G4S)3 or (G4Q)3-VL (comprising part of the CD3epsilon binding domain/paratope);
[0528] c) VL (comprising part of a cell surface antigen binding domain/paratope)-(G4S)3 or (G4Q)3-VH (comprising part of a cell surface antigen binding domain/paratope)-Peptide linker (SG4S) or (SG4Q)-VH (comprising part of the CD3epsilon binding domain/paratope)-(G4S)3 or (G4Q)3-VL (comprising part of the CD3epsilon binding domain/paratope)-Peptide linker (G4)-Fc monomer (part of the HLE domain)-(G4S)6 or (G4Q)6 or -Fc monomer (part of the HLE domain);
[0529] d) VH (comprising part of a cell surface antigen binding domain/paratope)-(G4S)3 or (G4Q)3-VL (comprising part of a cell surface antigen binding domain/paratope)-Peptide linker (SG4S) or (SG4Q)-VH (comprising part of the CD3epsilon binding domain/paratope)-(G4S)3 or (G4Q)3-VL (comprising part of the CD3epsilon binding domain/paratope)-Peptide linker (G4)-Fc monomer (part of the HLE domain)-(G4S)6 or (G4Q)6 or -Fc monomer (part of the HLE domain);
[0530] e) VH (comprising part of a first cell surface antigen binding domain/paratope)-(G4S)3 or (G4Q)3-VL (comprising part of a first cell surface antigen binding domain/paratope)-Peptide linker (SG4S) or (SG4Q)-VL (comprising part of a second cell surface antigen binding domain/paratope)-(G4S)3 or (G4Q)3-VH (comprising part of a second cell surface antigen binding domain/paratope)-Peptide linker (SG4S) or (SG4Q)-VH (comprising part of the CD3epsilon binding domain/paratope)-(G4S)3 or (G4Q)3-VL (comprising part of the CD3epsilon binding domain/paratope)-Peptide linker (G4)-Fc monomer (part of the HLE domain)-(G4S)6 or (G4Q)6 or -Fc monomer (part of the HLE domain);
[0531] f) VH (comprising part of a first cell surface antigen binding domain/paratope)-(G4S)3 or (G4Q)3-VL (comprising part of a first cell surface antigen binding domain/paratope)-Peptide linker (SG4S) or (SG4Q)-VH (comprising part of a second cell surface antigen binding domain/paratope)-(G4S)3 or (G4Q)3-VL (comprising part of a second cell surface antigen binding domain/paratope)-Peptide linker (SG4S) or (SG4Q)-VH (comprising part of the CD3epsilon binding domain/paratope)-(G4S)3 or (G4Q)3-VL (comprising part of the CD3epsilon binding domain/paratope)-Peptide linker (G4)-Fc monomer (part of the HLE domain)-(G4S)6 or (G4Q)6 or -Fc monomer (part of the HLE domain);
[0532] g) VL (comprising part of a first cell surface antigen binding domain/paratope)-(G4S)3 or (G4Q)3-VH (comprising part of a first cell surface antigen binding domain/paratope)-Peptide linker (SG4S) or (SG4Q)-VL (comprising part of a second cell surface antigen binding domain/paratope)-(G4S)3 or (G4Q)3-VH (comprising part of a second cell surface antigen binding domain/paratope)-Peptide linker (SG4S) or (SG4Q)-VH (comprising part of the CD3epsilon binding domain/paratope)-(G4S)3 or (G4Q)3-VL (comprising part of the CD3epsilon binding domain/paratope)-Peptide linker (G4)-Fc monomer (part of the HLE domain)-(G4S)6 or (G4Q)6 or -Fc monomer (part of the HLE domain)
[0533] h) VL (comprising part of a first cell surface antigen binding domain/paratope)-(G4S)3 or (G4Q)3-VH (comprising part of a first cell surface antigen binding domain/paratope)-Peptide linker (SG4S) or (SG4Q)-VH (comprising part of a second cell surface antigen binding domain/paratope)-(G4S)3 or (G4Q)3-VL (comprising part of a second cell surface antigen binding domain/paratope)-Peptide linker (SG4S) or (SG4Q)-VH (comprising part of the CD3epsilon binding domain/paratope)-(G4S)3 or (G4Q)3-VL (comprising part of the CD3epsilon binding domain/paratope)-Peptide linker (G4)-Fc monomer (part of the HLE domain)-(G4S)6 or (G4Q)6 or -Fc monomer (part of the HLE domain); or
[0534] i) Binding domain 1 ((VL (comprising part of a first cell surface antigen binding domain/paratope)-(G4S)3 or (G4Q)3-VH (comprising part of a first cell surface antigen binding domain/paratope)) or (VH (comprising part of a first cell surface antigen binding domain/paratope)-(G4S)3 or (G4Q)3-VL (comprising part of a first cell surface antigen binding domain/paratope)))-Peptide linker (G4S) or (G4Q)-CD3 binding domain 1 (VH (comprising part of a first CD3epsilon binding domain/paratope)-(G4S)3 or (G4Q)3-VL (comprising part of a first CD3epsilon binding domain/paratope))-Peptide linker (G4)-Fc monomer (part of the HLE domain)-(G4S)6 or (G4Q)6-Fc monomer (part of the HLE domain)-Peptide linker (G4)-Binding domain 2 ((VL (comprising part of a second cell surface antigen binding domain/paratope)-(G4S)3 or (G4Q)3-VH (comprising part of a first cell surface antigen binding domain/paratope)) or (VH (comprising part of a second cell surface antigen binding domain/paratope)-(G4S)3 or (G4Q)3-VL (comprising part of a second cell surface antigen binding domain/paratope)))—Peptide linker (G4S) or (G4Q)-CD3 binding domain 2 (VH (comprising part of a second CD3epsilon binding domain/paratope)-(G4S)3 or (G4Q)3-VL (comprising part of a second CD3epsilon binding domain/paratope)).

[0535] As is evident from the above, the VH and VL region sequence orientation of the binding domain(s) of the cell surface antigen can be VH-VL or VL-VH. Preferably, the cell surface antigen is a tumor antigen as detailed herein above. The HLE domain sequences made up of the Fc monomers and connecting linkers as detailed are preferably selected from the sequences as defined in SEQ ID NOs: 18 and 19. The two CD3 binding domains of the polypeptide construct of item i) are preferably the same CD3 binding domains, such as, preferably, the CD3 binding domain with VH and VL region sequences of SEQ ID NOs: 2028 and 2029. While peptide linkers (SG4S) or (SG4Q) are preferred at the indicated positions, they can also be replaced by (G4S) or (G4Q) linkers.

[0536] Covalent modifications of the polypeptides/polypeptide constructs are also included within the scope of this invention, and are generally, but not always, done post-translationally. For example, several types of covalent modifications of the construct are introduced into the molecule by reacting specific amino acid residues of the construct with an organic derivatizing agent that can react with selected side chains or with the N- or C-terminal residues. Derivatization with bifunctional agents is useful for crosslinking the constructs of the present invention to a water-insoluble support matrix or surface for use in a variety of methods. Glutaminyl and asparaginyl residues are frequently deamidated to the corresponding glutamyl and aspartyl residues, respectively. Alternatively, these residues are deamidated under mildly acidic conditions. Either form of these residues falls within the scope of this invention. Other modifications include hydroxylation of proline and lysine, phosphorylation of hydroxyl groups of seryl or threonyl residues, methylation of the α-amino groups of lysine, arginine, and histidine side chains (T. E. Creighton, Proteins: Structure and Molecular Properties, W. H. Freeman & Co., San Francisco, 1983, pp. 79-86), acetylation of the N-terminal amine, and amidation of any C-terminal carboxyl group.

[0537] Another type of covalent modification of the constructs included within the scope of this invention comprises altering the glycosylation pattern of the protein. As is known in the art, glycosylation patterns can depend on both the sequence of the protein (e.g., the presence or absence of specific glycosylation amino acid residues, discussed below), or the host cell or organism in which the protein is produced. Specific expression systems are discussed below. Glycosylation of polypeptides is typically either N-linked or O-linked. N-linked refers to the attachment of the carbohydrate moiety to the side chain of an asparagine residue. The tri-peptide sequences asparagine-X-serine and asparagine-X-threonine, where X is any amino acid except proline, are the recognition sequences for enzymatic attachment of the carbohydrate moiety to the asparagine side chain. Thus, the presence of either of these tri-peptide sequences in a polypeptide creates a potential glycosylation site. O-linked glycosylation refers to the attachment of one of the sugars N-acetylgalactosamine, galactose, or xylose, to a hydroxyamino acid, most commonly serine or threonine, although 5-hydroxyproline or 5-hydroxylysine may also be used.

[0538] Addition of glycosylation sites to the construct is conveniently accomplished by altering the amino acid sequence such that it contains one or more of the above-described tri-peptide sequences (for N-linked glycosylation sites). The alteration may also be made by the addition of, or substitution by, one or more serine or threonine residues to the starting sequence (for O-linked glycosylation sites). For ease, the amino acid sequence of a construct may be altered through changes at the DNA level, particularly by mutating the DNA encoding the polypeptide at preselected bases such that codons are generated that will translate into the desired amino acids.

[0539] Another means of increasing the number of carbohydrate moieties on the construct is by chemical or enzymatic coupling of glycosides to the protein. These procedures are advantageous in that they do not require production of the protein in a host cell that has glycosylation capabilities for N- and O-linked glycosylation. Depending on the coupling mode used, the sugar(s) may be attached to (a) arginine and histidine, (b) free carboxyl groups, (c) free sulfhydryl groups such as those of cysteine, (d) free hydroxyl groups such as those of serine, threonine, or hydroxyproline, (e) aromatic residues such as those of phenylalanine, tyrosine, or tryptophan, or (f) the amide group of glutamine. These methods are described in WO 87/05330, and in Aplin and Wriston, 1981, CRC Crit. Rev. Biochem., pp. 259-306.

[0540] Removal of carbohydrate moieties present on the starting construct may be accomplished chemically or enzymatically. Chemical deglycosylation requires exposure of the protein to the compound trifluoromethanesulfonic acid, or an equivalent compound. This treatment results in the cleavage of most or all sugars except the linking sugar (N-acetylglucosamine or N-acetylgalactosamine), while leaving the polypeptide intact. Chemical deglycosylation is described by Hakimuddin et al., 1987, Arch. Biochem. Biophys. 259:52 and by Edge et al., 1981, Anal. Biochem. 118:131. Enzymatic cleavage of carbohydrate moieties on polypeptides can be achieved using a variety of endo- and exo-glycosidases as described by Thotakura et al., 1987, Meth. Enzymol. 138:350. Glycosylation at potential glycosylation sites may be prevented using the compound tunicamycin as described by Duskin et al., 1982, J. Biol. Chem. 257:3105. Tunicamycin blocks the formation of protein-N-glycoside linkages.

[0541] Other modifications of the construct are also contemplated herein. For example, another type of covalent modification of the construct comprises linking the construct to various non-proteinaceous polymers, including polyols, in the manner set forth in U.S. Pat. Nos. 4,640,835; 4,496,689; 4,301,144; 4,670,417; 4,791,192 or 4,179,337. In addition, as is known in the art, amino acid substitutions may be made in various positions within the construct, e.g. to facilitate the addition of polymers such as polyethylene glycol (PEG).

[0542] In some embodiments, the covalent modification of the constructs of the invention comprises the addition of one or more labels. The labelling group may be coupled to the construct via spacer arms of various lengths to reduce potential steric hindrance. Various methods for labelling proteins are known in the art and can be used in performing the present invention. The term “label” or “labelling group” refers to any detectable label. In general, labels fall into a variety of classes, depending on the assay in which they are to be detected—the following examples include, but are not limited to:
[0543] a) isotopic labels, which may be radioactive or heavy isotopes, such as radioisotopes or radionuclides (e.g., ³H, ¹⁴C ¹⁵N, S, ⁸⁹Zr, ⁹⁰, ⁹⁹Tc, ¹¹¹In, ¹²⁵I, ¹³¹I)
[0544] b) magnetic labels (e.g., magnetic particles)
[0545] c) redox active moieties
[0546] d) optical dyes (including, but not limited to, chromophores, phosphors and fluorophores) such as fluorescent groups (e.g., FITC, rhodamine, lanthanide phosphors), chemiluminescent groups, and fluorescent labels or fluorophores which can be either “small molecule” fluores or proteinaceous fluores
[0547] e) enzymatic groups (e.g. horseradish peroxidase, β-galactosidase, luciferase, alkaline phosphatase)
[0548] f) biotinylated groups
[0549] g) predetermined polypeptide epitopes recognized by a secondary reporter (e.g., leucine zipper pair sequences, binding sites for secondary antibodies, metal binding domains, epitope tags, etc.).

[0550] By “fluorescent label” is meant any molecule that may be detected via its inherent fluorescent properties. Suitable fluorescent labels include, but are not limited to, fluorescein, rhodamine, tetramethylrhodamine, eosin, erythrosin, coumarin, methyl-coumarins, pyrene, Malacite green, stilbene, Lucifer Yellow, Cascade BlueJ, Texas Red, IAEDANS, EDANS, BODIPY FL, LC Red 640, Cy 5, Cy 5.5, LC Red 705, Oregon green, the Alexa-Fluor dyes (Alexa Fluor 350, Alexa Fluor 430, Alexa Fluor 488, Alexa Fluor 546, Alexa Fluor 568, Alexa Fluor 594, Alexa Fluor 633, Alexa Fluor 660, Alexa Fluor 680), Cascade Blue, Cascade Yellow and R-phycoerythrin (PE) (Molecular Probes, Eugene, OR), FITC, Rhodamine, and Texas Red (Pierce, Rockford, IL), Cy5, Cy5.5, Cy7 (Amersham Life Science, Pittsburgh, PA). Suitable optical dyes, including fluorophores, are described in Molecular Probes Handbook by Richard P. Haugland.

[0551] Suitable proteinaceous fluorescent labels also include, but are not limited to, green fluorescent protein, including a Renilla, Ptilosarcus, or Aequorea species of GFP (Chalfie et al., 1994, Science 263:802-805), EGFP (Clontech Laboratories, Inc., Genbank® Accession Number U55762), blue fluorescent protein (BFP, Quantum Biotechnologies, Inc. 1801 de Maisonneuve Blvd. West, 8th Floor, Montreal, Quebec, Canada H3H 1J9; Stauber, 1998, Biotechniques 24:462-471; Heim et al., 1996, Curr. Biol. 6:178-182), enhanced yellow fluorescent protein (EYFP, Clontech Laboratories, Inc.), luciferase (Ichiki et al., 1993, J. Immunol. 150:5408-5417), p galactosidase (Nolan et al., 1988, Proc. Natl. Acad. Sci. U.S.A. 85:2603-2607) and Renilla (WO92/15673, WO95/07463, WO98/14605, WO98/26277, WO99/49019, U.S. Pat. Nos. 5,292,658; 5,418,155; 5,683,888; 5,741,668; 5,777,079; 5,804,387; 5,874,304; 5,876,995; 5,925,558).

[0552] Leucine zipper domains are peptides that promote oligomerization of the proteins in which they are found. Leucine zippers were originally identified in several DNA-binding proteins (Landschulz et al., 1988, Science 240:1759), and have since been found in a variety of different proteins. Among the known leucine zippers are naturally occurring peptides and derivatives thereof that dimerize or trimerize. Examples of leucine zipper domains suitable for producing soluble oligomeric proteins are described in PCT application WO 94/10308, and the leucine zipper derived from lung surfactant protein D (SPD) described in Hoppe et al., 1994, FEBS Letters 344:191. The use of a modified leucine zipper that allows for stable trimerization of a heterologous protein fused thereto is described in Fanslow et al., 1994, Semin. Immunol. 6:267-78.

[0553] The polypeptide construct of the invention may also comprise additional domains, which are e.g. helpful in the isolation of the molecule or relate to an adapted pharmacokinetic profile of the molecule. Domains helpful for the isolation of a construct may be selected from peptide motives or secondarily introduced moieties, which can be captured in an isolation method, e.g. an isolation column. Non-limiting embodiments of such additional domains comprise peptide motives known as Myc-tag, HAT-tag, HA-tag, TAP-tag, GST-tag, chitin binding domain (CBD-tag), maltose binding protein (MBP-tag), Flag-tag, Strep-tag and variants thereof (e.g. StrepII-tag) and His-tag. All herein disclosed constructs characterized by the identified CDRs may comprise a His-tag domain, which is generally known as a repeat of consecutive His residues in the amino acid sequence of a molecule, e.g. of five His residues, or of six His residues (hexa-histidine). The His-tag may be located e.g. at the N- or C-terminus of the construct. In one embodiment, a hexa-histidine tag (HHHHHH) is linked via peptide bond to the C-terminus of the construct according to the invention. A histidine tag is preferred, especially a 6×His tag.

[0554] The invention also relates to a polynucleotide encoding a polypeptide or polypeptide construct of the invention. Nucleic acid molecules are biopolymers composed of nucleotides. A polynucleotide is a biopolymer composed of 13 or more nucleotide monomers covalently bonded in a chain. DNA (such as cDNA) and RNA (such as mRNA) are examples of polynucleotides/nucleic acid molecules with distinct biological function. Nucleotides are organic molecules that serve as the monomers or subunits of nucleic acid molecules like DNA or RNA. The nucleic acid molecule or polynucleotide of the present invention can be double stranded or single stranded, linear or circular. It is envisaged that the nucleic acid molecule or polynucleotide is comprised in a vector. It is furthermore envisaged that such vector is comprised in a host cell. Said host cell is, e.g. after transformation or transfection with the vector or the polynucleotide/nucleic acid molecule of the invention, capable of expressing the construct. For this purpose, the polynucleotide or nucleic acid molecule is operatively linked with control sequences.

[0555] The genetic code is the set of rules by which information encoded within genetic material (nucleic acids) is translated into proteins. Biological decoding in living cells is accomplished by the ribosome which links amino acids in an order specified by mRNA, using tRNA molecules to carry amino acids and to read the mRNA three nucleotides at a time. The code defines how sequences of these nucleotide triplets, called codons, specify which amino acid will be added next during protein synthesis. With some exceptions, a three-nucleotide codon in a nucleic acid sequence specifies a single amino acid. Because the vast majority of genes are encoded with exactly the same code, this particular code is often referred to as the canonical or standard genetic code.

[0556] Degeneracy of codons is the redundancy of the genetic code, exhibited as the multiplicity of three-base pair codon combinations that specify an amino acid. Degeneracy results because there are more codons than encodable amino acids. The codons encoding one amino acid may differ in any of their three positions; however, often this difference is in the second or third position. For instance, codons GAA and GAG both specify glutamic acid and exhibit redundancy; but, neither specifies any other amino acid nor thus demonstrate ambiguity. The genetic codes of different organisms can be biased towards using one of the several codons that encode the same amino acid over the others—that is, a greater frequency of one will be found than expected by chance. For example, leucine is specified by six distinct codons, some of which are rarely used. Codon usage tables detailing genomic codon usage frequencies for most organisms are available. Recombinant gene technologies commonly take advantage of this effect by implementing a technique termed codon optimization, in which those codons are used to design a polynucleotide which are preferred by the respective host cell (such as a cell of human hamster origin, an Escherichia coli cell, or a Saccharomyces cerevisiae cell), e.g. to increase protein expression. It is hence envisaged that the polynucleotides/nucleic acid molecules of the present disclosure are codon optimized. Nevertheless, the polynucleotide/nucleic acid molecule encoding a construct of the invention may be designed using any codon that encodes the desired amino acid.

[0557] According to one embodiment, the polynucleotide/nucleic acid molecule of the present invention encoding the polypeptide construct of the invention is in the form of one single molecule or in the form of two or more separate molecules. If the construct of the present invention is a single chain construct, the polynucleotide/nucleic acid molecule encoding such construct will most likely also be in the form of one single molecule. However, it is also envisaged that different components of the polypeptide construct (such as the different domains, e.g. the paratope (antigen-binding (epitope-binding) structure)-comprising domain which binds to a cell surface antigen, the paratope (antigen-binding (epitope-binding) structure)-comprising domain which binds to CD3, and/or further domains such as antibody constant domains) are located on separate polypeptide chains, in which case the polynucleotide/nucleic acid molecule is most likely in the form of two or more separate molecules.

[0558] The same applies for the vector comprising a polynucleotide/nucleic acid molecule of the present invention. If the construct of the present invention is a single chain construct, one vector may comprise the polynucleotide which encodes the construct in one single location (as one single open reading frame, ORF). One vector may also comprise two or more polynucleotides/nucleic acid molecules at separate locations (with individual ORFs), each one of them encoding a different component of the construct of the invention. It is envisaged that the vector comprising the polynucleotide/nucleic acid molecule of the present invention is in the form of one single vector or two or more separate vectors. In one embodiment, and for the purpose of expressing the construct in a host cell, the host cell of the invention should comprise the polynucleotide/nucleic acid molecule encoding the construct or the vector comprising such polynucleotide/nucleic acid molecule in their entirety, meaning that all components of the construct—whether encoded as one single molecule or in separate molecules/locations—will assemble after translation and form together the biologically active construct of the invention.

[0559] The invention further relates to a vector comprising a polynucleotide/nucleic acid molecule of the invention. A vector is a nucleic acid molecule used as a vehicle to transfer (foreign) genetic material into a cell, usually to ensure the replication and/or expression of the genetic material. The term “vector” encompasses—but is not restricted to—plasmids, viruses, cosmids, and artificial chromosomes. Some vectors are designed specifically for cloning (cloning vectors), others for protein expression (expression vectors). So-called transcription vectors are mainly used to amplify their insert. The manipulation of DNA is normally conducted on E. coli vectors, which contain elements necessary for their maintenance in E. coli. However, vectors may also have elements that allow them to be maintained in another organism such as yeast, plant or mammalian cells, and these vectors are called shuttle vectors. Insertion of a vector into the target or host cell is usually called transformation for bacterial cells and transfection for eukaryotic cells, while insertion of a viral vector is often called transduction.

[0560] In general, engineered vectors comprise an origin of replication, a multicloning site and a selectable marker. The vector itself is generally a nucleotide sequence, commonly a DNA sequence, that comprises an insert (transgene) and a larger sequence that serves as the “backbone” of the vector. While the genetic code determines the polypeptide sequence for a given coding region, other genomic regions can influence when and where these polypeptides are produced. Modern vectors may therefore encompass additional features besides the transgene insert and a backbone: promoter, genetic marker, antibiotic resistance, reporter gene, targeting sequence, protein purification tag. Vectors called expression vectors (expression constructs) specifically are for the expression of the transgene in the target cell, and generally have control sequences.

[0561] The term “control sequences” refers to DNA sequences necessary for the expression of an operably linked coding sequence in a specific host organism. The control sequences that are suitable for prokaryotes, for example, include a promoter, optionally an operator sequence, and a ribosome binding site. Eukaryotic cells are known to utilize promoters, polyadenylation signals, a Kozak sequence and enhancers.

[0562] A nucleic acid is “operably linked” when it is placed into a functional relationship with another nucleic acid sequence. For example, DNA for a presequence or secretory leader is operably linked to DNA for a polypeptide if it is expressed as a preprotein that participates in the secretion of the polypeptide; a promoter or enhancer is operably linked to a coding sequence if it affects the transcription of the sequence; or a ribosome binding site is operably linked to a coding sequence if it is positioned to facilitate translation. Generally, “operably linked” means that the nucleotide sequences being linked are contiguous, and, in the case of a secretory leader, contiguous and in reading phase. However, enhancers do not have to be contiguous. Linking is accomplished by ligation at convenient restriction sites. If such sites do not exist, the synthetic oligonucleotide adaptors or linkers are used in accordance with conventional practice.

[0563] “Transfection” is the process of deliberately introducing nucleic acid molecules or polynucleotides (including vectors) into target cells. The term is mostly used for non-viral methods in eukaryotic cells. Transduction is often used to describe virus-mediated transfer of nucleic acid molecules or polynucleotides. Transfection of animal cells typically involves opening transient pores or “holes” in the cell membrane, to allow the uptake of material. Transfection can be carried out using biological particles (such as viral transfection, also called viral transduction), chemical-based methods (such as using calcium phosphate, lipofection, Fugene, cationic polymers, nanoparticles) or physical treatment (such as electroporation, microinjection, gene gun, cell squeezing, magnetofection, hydrostatic pressure, impalefection, sonication, optical transfection, heat shock).

[0564] The term “transformation” is used to describe non-viral transfer of nucleic acid molecules or polynucleotides (including vectors) into bacteria, and into non-animal eukaryotic cells, including plant cells. Transformation is hence the genetic alteration of a bacterial or non-animal eukaryotic cell resulting from the direct uptake through the cell membrane(s) from its surroundings and subsequent incorporation of exogenous genetic material (nucleic acid molecules). Transformation can be achieved by artificial means. For transformation to happen, cells or bacteria must be in a state of competence, which might occur as a time-limited response to environmental conditions such as starvation and cell density and can also be artificially induced.

[0565] Moreover, the invention provides a host cell transformed or transfected with the polynucleotide/nucleic acid molecule of the invention or with the vector of the invention.

[0566] As used herein, the terms “host cell” or “recipient cell” are intended to include any individual cell or cell culture that can be or has been recipient of vectors, exogenous nucleic acid molecules and/or polynucleotides encoding the construct of the present invention; and/or recipients of the construct itself. The introduction of the respective material into the cell is carried out by way of transformation, transfection and the like (vide supra). The term “host cell” is also intended to include progeny or potential progeny of a single cell. Because certain modifications may occur in succeeding generations due to either natural, accidental, or deliberate mutation or due to environmental influences, such progeny may not, in fact, be completely identical (in morphology or in genomic or total DNA complement) to the parent cell but is still included within the scope of the term as used herein. Suitable host cells include prokaryotic or eukaryotic cells and include—but are not limited to—bacteria (such as E. coli), yeast cells, fungi cells, plant cells, and animal cells such as insect cells and mammalian cells, e.g., hamster, murine, rat, macaque or human.

[0567] In addition to prokaryotes, eukaryotic microbes such as filamentous fungi or yeast are suitable cloning or expression hosts for the construct of the invention. Saccharomyces cerevisiae, or common baker's yeast, is the most commonly used among lower eukaryotic host microorganisms. However, a number of other genera, species, and strains are commonly available and useful herein, such as Schizosaccharomyces pombe, Kluyveromyces hosts such as K. lactis, K. fragilis (ATCC 12424), K. bulgaricus (ATCC 16045), K. wickeramii (ATCC 24178), K. waltii (ATCC 56500), K. drosophilarum (ATCC 36906), K. thermotolerans, and K. marxianus; yarrowia (EP 402 226); Pichia pastoris (EP 183 070); Candida; Trichoderma reesia (EP 244 234); Neurospora crassa; Schwanniomyces such as Schwanniomyces occidentalis; and filamentous fungi such as Neurospora, Penicillium, Tolypocladium, and Aspergillus hosts such as A. nidulans and A. niger.

[0568] Suitable host cells for the expression of a glycosylated construct are derived from multicellular organisms. Examples of invertebrate cells include plant and insect cells. Numerous baculoviral strains and variants and corresponding permissive insect host cells from hosts such as Spodoptera frugiperda (caterpillar), Aedes aegypti (mosquito), Aedes albopictus (mosquito), Drosophila melanogaster (fruit fly), and Bombyx mori (silkmoth) have been identified. A variety of viral strains for transfection are publicly available, e.g., the L-1 variant of Autographa californica NPV and the Bm-5 strain of Bombyx mori NPV, and such viruses may be used as the virus herein according to the present invention, particularly for transfection of Spodoptera frugiperda cells.

[0569] Plant cell cultures of cotton, corn, potato, soybean, petunia, tomato, Arabidopsis and tobacco can also be used as hosts. Cloning and expression vectors useful in the production of proteins in plant cell culture are known to those of skill in the art. See e.g. Hiatt et al., Nature (1989) 342: 76-78, Owen et al. (1992) Bio/Technology 10: 790-794, Artsaenko et al. (1995) The Plant J 8: 745-750, and Fecker et al. (1996) Plant Mol Biol 32: 979-986.

[0570] However, interest has been greatest in vertebrate cells, and propagation of vertebrate cells in culture (cell culture) has become a routine procedure. Examples of useful mammalian host cell lines are monkey kidney CV1 line transformed by SV40 (such as COS-7, ATCC CRL 1651); human embryonic kidney line (such as 293 or 293 cells subcloned for growth in suspension culture, Graham et al., J. Gen Virol. 36: 59 (1977)); baby hamster kidney cells (such as BHK, ATCC CCL 10); Chinese hamster ovary cells/-DHFR (such as CHO, Urlaub et al., Proc. Natl. Acad. Sci. USA 77: 4216 (1980)); mouse sertoli cells (such as TM4, Mather, Biol. Reprod. 23: 243-251 (1980)); monkey kidney cells (such as CVI ATCC CCL 70); African green monkey kidney cells (such as VERO-76, ATCC CRL1587); human cervical carcinoma cells (such as HELA, ATCC CCL 2); canine kidney cells (such as MDCK, ATCC CCL 34); buffalo rat liver cells (such as BRL 3A, ATCC CRL 1442); human lung cells (such as W138, ATCC CCL 75); human liver cells (such as Hep G2,1413 8065); mouse mammary tumor (such as MMT 060562, ATCC CCL-51); TRI cells (Mather et al., Annals N. Y Acad. Sci. (1982) 383: 44-68); MRC 5 cells; FS4 cells; and a human hepatoma line (such as Hep G2).

[0571] In a further embodiment, the invention provides a process for the production of a polypeptide or polypeptide construct of the invention, said process comprising culturing a host cell of the invention under conditions allowing the expression of the construct of the invention and recovering the produced construct from the culture.

[0572] As used herein, the term “culturing” refers to the in vitro maintenance, differentiation, growth, proliferation and/or propagation of cells under suitable conditions in a medium. Cells are grown and maintained in a cell growth medium at an appropriate temperature and gas mixture. Culture conditions vary widely for each cell type. Typical growth conditions are a temperature of about 37° C., a C02 concentration of about 5% and a humidity of about 95%. Recipes for growth media can vary e.g. in pH, concentration of the carbon source (such as glucose), nature and concentration of growth factors, and the presence of other nutrients (such as amino acids or vitamins). The growth factors used to supplement media are often derived from the serum of animal blood, such as fetal bovine serum (FBS), bovine calf serum (FCS), equine serum, and porcine serum. Cells can be grown either in suspension or as adherent cultures. There are also cell lines that have been modified to be able to survive in suspension cultures, so they can be grown to a higher density than adherent conditions would allow.

[0573] The term “expression” includes any step involved in the production of a construct of the invention including, but not limited to, transcription, post-transcriptional modification, translation, folding, post-translational modification, targeting to specific subcellular or extracellular locations, and secretion. The term “recovering” refers to a series of processes intended to isolate the construct from the cell culture. The “recovering” or “purification” process may separate the protein and non-protein parts of the cell culture, and finally separate the desired construct from all other polypeptides and proteins. Separation steps usually exploit differences in protein size, physico-chemical properties, binding affinity and biological activity. Preparative purifications aim to produce a relatively large quantity of purified proteins for subsequent use, while analytical purification produces a relatively small amount of a protein for a variety of research or analytical purposes.

[0574] When using recombinant techniques, the construct can be produced intracellularly, in the periplasmic space, or directly secreted into the medium. If the construct is produced intracellularly, as a first step, the particulate debris, either host cells or lysed fragments, are removed, for example, by centrifugation or ultrafiltration. The construct of the invention may e.g. be produced in bacteria such as E. coli. After expression, the construct is isolated from the bacterial cell paste in a soluble fraction and can be purified e.g. via affinity chromatography and/or size exclusion. Final purification can be carried out in a manner that is like the process for purifying a construct expressed in mammalian cells and secreted into the medium. Carteret al. (Biotechnology (NY) 1992 February; 10(2):163-7) describe a procedure for isolating antibodies which are secreted to the periplasmic space of E. coli.

[0575] Where the antibody is secreted into the medium, supernatants from such expression systems are generally first concentrated using a commercially available protein concentration filter, for example, an ultrafiltration unit.

[0576] The construct of the invention prepared from the host cells can be recovered or purified using, for example, hydroxylapatite chromatography, gel electrophoresis, dialysis, and affinity chromatography. Other techniques for protein purification such as fractionation on an ion-exchange column, mixed mode ion exchange, HIC, ethanol precipitation, size exclusion chromatography, reverse phase HPLC, chromatography on silica, chromatography on heparin sepharose, chromatography on an anion or cation exchange resin (such as a polyaspartic acid column), immunoaffinity (such as Protein A/G/L) chromatography, chromato-focusing, SDS-PAGE, ultracentrifugation, and ammonium sulfate precipitation are also available depending on the construct to be recovered.

[0577] A protease inhibitor may be included in any of the foregoing steps to inhibit proteolysis, and antibiotics may be included to prevent the growth of contaminants.

[0578] Moreover, the invention provides a pharmaceutical composition or formulation comprising a polypeptide or polypeptide construct of the invention or a polypeptide or polypeptide construct produced according to the process of the invention.

[0579] As used herein, the term “pharmaceutical composition” relates to a composition which is suitable for administration to a patient, preferably a human patient. The particularly preferred pharmaceutical composition of this invention comprises one or a plurality of the construct(s) of the invention, preferably in a therapeutically effective amount. Preferably, the pharmaceutical composition further comprises suitable formulations of one or more (pharmaceutically effective) carriers, stabilizers, excipients, diluents, solubilizers, surfactants, emulsifiers, preservatives and/or adjuvants. Acceptable constituents of the composition are preferably nontoxic to recipients at the dosages and concentrations employed. Pharmaceutical compositions of the invention include, but are not limited to, liquid, frozen, and lyophilized compositions.

[0580] The compositions may comprise a pharmaceutically acceptable carrier. In general, as used herein, “pharmaceutically acceptable carrier” means all aqueous and non-aqueous solutions, sterile solutions, solvents, buffers, e.g. phosphate buffered saline (PBS) solutions, water, suspensions, emulsions, such as oil/water emulsions, various types of wetting agents, liposomes, dispersion media and coatings, which are compatible with pharmaceutical administration, in particular with parenteral administration. The use of such media and agents in pharmaceutical compositions is well known in the art, and the compositions comprising such carriers can be formulated by well-known conventional methods.

[0581] Certain embodiments provide pharmaceutical compositions comprising the construct of the invention and further one or more excipients such as those illustratively described in this section and elsewhere herein. Excipients can be used in the invention for a wide variety of purposes, such as adjusting physical, chemical, or biological properties of formulations, such as adjustment of viscosity, and or processes of the invention to improve effectiveness and/or to stabilize such formulations and processes against degradation and spoilage e.g. due to stresses that occur during manufacturing, shipping, storage, pre-use preparation, administration, and thereafter. Excipients should in general be used in their lowest effective concentrations.

[0582] In certain embodiments, the pharmaceutical composition may contain formulation materials for modifying, maintaining or preserving certain characteristics of the composition such as the pH, osmolarity, viscosity, clarity, color, isotonicity, odor, sterility, stability, rate of dissolution or release, adsorption or penetration (see, Remington's Pharmaceutical Sciences, 18” Edition, 1990, Mack Publishing Company). In such embodiments, suitable formulation materials may include, but are not limited to:
[0583] amino acids
[0584] antimicrobials such as antibacterial and antifungal agents
[0585] antioxidants
[0586] buffers, buffer systems and buffering agents that are used to maintain the composition at physiological pH or at a slightly lower pH, typically within a range of from about 5 to about 8 or 9
[0587] non-aqueous solvents, vegetable oils, and injectable organic esters
[0588] aqueous carriers including water, alcoholic/aqueous solutions, emulsions or suspensions, including saline and buffered media
[0589] biodegradable polymers such as polyesters
[0590] bulking agents
[0591] chelating agents
[0592] isotonic and absorption delaying agents
[0593] complexing agents
[0594] fillers
[0595] carbohydrates
[0596] (low molecular weight) proteins, polypeptides or proteinaceous carriers, preferably of human origin
[0597] coloring and flavouring agents
[0598] sulfur containing reducing agents
[0599] diluting agents
[0600] emulsifying agents
[0601] hydrophilic polymers
[0602] salt-forming counter-ions
[0603] preservatives
[0604] metal complexes
[0605] solvents and co-solvents
[0606] sugars and sugar alcohols
[0607] suspending agents
[0608] surfactants or wetting agents
[0609] stability enhancing agents
[0610] tonicity enhancing agents
[0611] parenteral delivery vehicles
[0612] intravenous delivery vehicles

[0613] It is common knowledge that the different constituents of the pharmaceutical composition can have different effects, for example, and amino acid can act as a buffer, a stabilizer and/or an antioxidant; mannitol can act as a bulking agent and/or a tonicity enhancing agent; sodium chloride can act as delivery vehicle and/or tonicity enhancing agent; etc.

[0614] In the context of the present invention, a pharmaceutical composition may comprise:
[0615] (a) a polypeptide or polypeptide construct as described herein,
[0616] (b) at least one buffer agent,
[0617] (c) at least one saccharide, and
[0618] (d) at least one surfactant;
[0619] wherein the pH of the pharmaceutical composition is in the range of 3.5 to 6.

[0620] In the composition described above, the first domain preferably has an isoelectric point (pI) in the range of 4 to 9.5; the second domain has a pI in the range of 8 to 10, preferably 8.5 to 9.0; and the construct optionally comprises a third domain comprising two polypeptide monomers, each comprising a hinge, a CH2 domain and a CH3 domain, wherein said two polypeptide monomers are fused to each other via a peptide linker.

[0621] In the composition described above, it is further envisaged that the at least one buffer agent is present at a concentration range of 5 to 200 mM, more preferably at a concentration range of 10 to 50 mM. It is also envisaged that the at least one saccharide is selected from the group consisting of monosaccharide, disaccharide, cyclic polysaccharide, sugar alcohol, linear branched dextran or linear non-branched dextran. It is also envisaged that the disaccharide is selected from the group consisting of sucrose, trehalose and mannitol, sorbitol, and combinations thereof. It is further envisaged that the sugar alcohol is sorbitol. It is also envisaged that the at least one saccharide is present at a concentration in the range of 1 to 15% (m/V), preferably in a concentration range of 9 to 12% (m/V). It is further envisaged that the construct is present in a concentration range of 0.1 to 8 mg/ml, preferably of 0.2-2.5 mg/ml, more preferably of 0.25-1.0 mg/ml.

[0622] According to one embodiment of the composition described above, the at least one surfactant is selected from the group consisting of polysorbate 20, polysorbate 40, polysorbate 60, polysorbate 80, poloxamer 188, pluronic F68, triton X-100, polyoxyethylen, PEG 3350, PEG 4000 and combinations thereof. It is further envisaged that the at least one surfactant is present at a concentration in the range of 0.004 to 0.5% (m/V), preferably in the range of 0.001 to 0.01% (m/V). It is envisaged that the pH of the composition is in the range of 4.0 to 5.0, preferably 4.2. It is also envisaged that the pharmaceutical composition has an osmolarity in the range of 150 to 500 mOsm. It is further envisaged that the pharmaceutical composition further comprises an excipient selected from the group consisting of one or more polyol(s) and one or more amino acid(s). It is envisaged in the context of the present invention that said one or more excipient is present in the concentration range of 0.1 to 15% (w/V).

[0623] The present invention also provides a pharmaceutical composition comprising (a) the construct as described herein, preferably in a concentration range of 0.1 to 8 mg/ml, preferably of 0.2-2.5 mg/ml, more preferably of 0.25-1.0 mg/ml; (b) 10 mM glutamate or acetate; (c) 9% (m/V) sucrose or 6% (m/V) sucrose and 6% (m/V) hydroxypropyl-β-cyclodextrin; (d) 0.01% (m/V) polysorbate 80; wherein the pH of the liquid pharmaceutical composition is 4.2.

[0624] It is envisaged that the composition of the invention might comprise, in addition to the construct of the invention defined herein, further biologically active agents, depending on the intended use of the composition. Such agents might be drugs acting on the gastro-intestinal system, drugs acting as cytostatica, drugs preventing hyperurikemia, drugs inhibiting immunoreactions, drugs modulating the inflammatory response, drugs acting on the circulatory system and/or agents such as cytokines known in the art. It is also envisaged that the polypeptide construct of the present invention is applied in a co-therapy, i.e., in combination with another anti-cancer medicament.

[0625] In this context, it is envisaged that the pharmaceutical composition of the invention (which comprises a construct comprising a CD3 binding domain and at least a further binding domain which binds to a cell surface target antigen, preferably a tumor antigen on the surface of a target cell, as described in more detail herein above) furthermore comprises an agent, preferably an antibody or construct, which binds to a protein of the immune checkpoint pathway (such as PD-1 or CTLA-4) or to a co-stimulatory immune checkpoint receptor (such as 4-11BE). The present invention also refers to a combination of a polypeptide construct according to the invention (which comprises a construct comprising a CD3 binding domain and at least a further binding domain which binds to a cell surface target antigen, preferably a tumor antigen on the surface of a target cell, as described in more detail herein above) and an agent, preferably an antibody or polypeptide construct, which binds to a protein of the immune checkpoint pathway (such as PD-1 or CTLA-4) or to a co-stimulatory immune checkpoint receptor (such as 4-11BE). Due to the nature of the at least two ingredients of the combination, namely their pharmaceutical activity, the combination can also be referred to as a therapeutic combination. In some embodiments, the combination can be in the form of a pharmaceutical composition or of a kit. According to one embodiment, the pharmaceutical composition or the combination comprises a construct of the invention and an antibody or construct which binds to PD-1. Anti-PD-1 binding proteins useful for this purpose are e.g. described in detail in PCT/US2019/013205 incorporated herein by reference.

[0626] In certain embodiments, the optimal pharmaceutical composition is determined depending upon, for example, the intended route of administration, delivery format and desired dosage. See, for example, Remington's Pharmaceutical Sciences, supra. In certain embodiments, such compositions may influence the physical state, stability, rate of in vivo release and rate of in vivo clearance of the construct of the invention. In certain embodiments, the primary vehicle or carrier in a pharmaceutical composition may be either aqueous or non-aqueous in nature. For example, a suitable vehicle or carrier may be water for injection or physiological saline solution, possibly supplemented with other materials common in compositions for parenteral administration. In certain embodiments, the compositions comprising the construct of the invention may be prepared for storage by mixing the selected composition having the desired degree of purity with optional formulation agents (Remington's Pharmaceutical Sciences, supra) in the form of a lyophilized cake or an aqueous solution. Further, in certain embodiments, the construct of the invention may be formulated as a lyophilizate using appropriate excipients.

[0627] When parenteral administration is contemplated, the therapeutic compositions for use in this invention may be provided in the form of a pyrogen-free, parenterally acceptable aqueous solution comprising the desired construct of the invention in a pharmaceutically acceptable vehicle. A particularly suitable vehicle for parenteral injection is sterile distilled water in which the construct of the invention is formulated as a sterile, isotonic solution, properly preserved. In certain embodiments, the preparation can involve the formulation of the desired molecule with an agent that may provide controlled or sustained release of the product which can be delivered via depot injection, or that may promote sustained duration in the circulation. In certain embodiments, implantable drug delivery devices may be used to introduce the desired construct.

[0628] Additional pharmaceutical compositions will be evident to those skilled in the art, including formulations involving the construct of the invention in sustained or controlled delivery formulations. Techniques for formulating a variety of sustained- or controlled-delivery means are known to those skilled in the art. The construct may also be entrapped in microcapsules prepared, for example, by coacervation techniques or by interfacial polymerization, in colloidal drug delivery systems, or in macroemulsions. Such techniques are disclosed in Remington's Pharmaceutical Sciences, supra.

[0629] Pharmaceutical compositions used for in vivo administration are typically provided as sterile preparations. Sterilization can be accomplished by filtration through sterile filtration membranes. When the composition is lyophilized, sterilization using this method may be conducted either prior to or following lyophilization and reconstitution. Compositions for parenteral administration can be stored in lyophilized form or in a solution. Parenteral compositions are generally placed into a container having a sterile access port, for example, an intravenous solution bag or vial having a stopper pierceable by a hypodermic injection needle.

[0630] Another aspect of the invention includes self-buffering formulations comprising the construct of the invention, which can be used as pharmaceutical compositions, as described in international patent application WO 2006/138181. A variety of publications are available on protein stabilization and formulation materials and methods useful in this regard, such as Arawaka T. et al., Pharm Res. 1991 March; 8(3):285-91; Kendrick et al., “Physical stabilization of proteins in aqueous solution” in: Rational Design of Stable Protein Formulations: Theory and Practice, Carpenter and Manning, eds. Pharmaceutical Biotechnology. 13: 61-84 (2002), and Randolph and Jones, Pharm Biotechnol. 2002; 13:159-75, see particularly the parts pertinent to excipients and processes for self-buffering protein formulations, especially as to protein pharmaceutical products and processes for veterinary and/or human medical uses.

[0631] Salts may be used in accordance with certain embodiments of the invention, e.g. to adjust the ionic strength and/or the isotonicity of a composition or formulation and/or to improve the solubility and/or physical stability of a construct or other ingredient of a composition in accordance with the invention. Ions can stabilize the native state of proteins by binding to charged residues on the protein's surface and by shielding charged and polar groups in the protein and reducing the strength of their electrostatic interactions, attractive, and repulsive interactions. Ions also can stabilize the denatured state of a protein by binding to, particularly the denatured peptide linkages (—CONH) of the protein. Furthermore, ionic interaction with charged and polar groups in a protein also can reduce intermolecular electrostatic interactions and, thereby, prevent or reduce protein aggregation and insolubility.

[0632] Ionic species differ significantly in their effects on proteins. Several categorical rankings of ions and their effects on proteins have been developed that can be used in formulating pharmaceutical compositions in accordance with the invention. One example is the Hofmeister series, which ranks ionic and polar non-ionic solutes by their effect on the conformational stability of proteins in solution. Stabilizing solutes are referred to as “kosmotropic”. Destabilizing solutes are referred to as “chaotropic”. Kosmotropes are commonly used at high concentrations to precipitate proteins from solution (“salting-out”). Chaotropes are commonly used to denature and/or to solubilize proteins (“salting-in”). The relative effectiveness of ions to “salt-in” and “salt-out” defines their position in the Hofmeister series.

[0633] Free amino acids can be used in formulations or compositions comprising the construct of the invention in accordance with various embodiments of the invention as bulking agents, stabilizers, and antioxidants, as well as for other standard uses. Certain amino acids can be used for stabilizing proteins in a formulation, others are useful during lyophilization to ensure correct cake structure and properties of the active ingredient. Some amino acids may be useful to inhibit protein aggregation in both liquid and lyophilized formulations, and others are useful as antioxidants.

[0634] Polyols are kosmotropic and are useful as stabilizing agents in both liquid and lyophilized formulations to protect proteins from physical and chemical degradation processes. Polyols are also useful for adjusting the tonicity of formulations and for protecting against freeze-thaw stresses during transport or the preparation of bulks during the manufacturing process. Polyols can also serve as cryoprotectants in the context of the present invention.

[0635] Certain embodiments of the formulation or composition comprising the construct of the invention can comprise surfactants. Proteins may be susceptible to adsorption on surfaces and to denaturation and resulting aggregation at air-liquid, solid-liquid, and liquid-liquid interfaces. These deleterious interactions generally scale inversely with protein concentration and are typically exacerbated by physical agitation, such as that generated during the shipping and handling of a product. Surfactants are routinely used to prevent, minimize, or reduce surface adsorption. Surfactants also are commonly used to control protein conformational stability. The use of surfactants in this regard is protein specific, since one specific surfactant will typically stabilize some proteins and destabilize others.

[0636] Certain embodiments of the formulation or composition comprising the construct of the invention can comprise one or more antioxidants. To some extent deleterious oxidation of proteins can be prevented in pharmaceutical formulations by maintaining proper levels of ambient oxygen and temperature and by avoiding exposure to light. Antioxidant excipients can also be used to prevent oxidative degradation of proteins. It is envisaged that antioxidants for use in therapeutic protein formulations in accordance with the present invention can be water-soluble and maintain their activity throughout the shelf life of the product (the composition comprising the construct). Antioxidants can also damage proteins and should hence—among other things—be selected in a way to eliminate or sufficiently reduce the possibility of antioxidants damaging the construct or other proteins in the formulation.

[0637] Certain embodiments of the formulation or composition comprising the construct of the invention can comprise one or more preservatives. Preservatives are necessary for example when developing multi-dose parenteral formulations that involve more than one extraction from the same container. Their primary function is to inhibit microbial growth and ensure product sterility throughout the shelf-life or term of use of the drug product. Although preservatives have a long history of use with small-molecule parenterals, the development of protein formulations that include preservatives can be challenging. Preservatives very often have a destabilizing effect (aggregation) on proteins, and this has become a major factor in limiting their use in multi-dose protein formulations. To date, most protein drugs have been formulated for single-use only. However, when multi-dose formulations are possible, they have the added advantage of enabling patient convenience, and increased marketability. A good example is that of human growth hormone (hGH) where the development of preserved formulations has led to commercialization of more convenient, multi-use injection pen presentations. Several aspects need to be considered during the formulation and development of preserved dosage forms. The effective preservative concentration in the drug product must be optimized. This requires testing a given preservative in the dosage form with concentration ranges that confer anti-microbial effectiveness without compromising protein stability.

[0638] As might be expected, development of liquid formulations containing preservatives are more challenging than lyophilized formulations. Freeze-dried products can be lyophilized without the preservative and reconstituted with a preservative containing diluent at the time of use. This shortens the time during which a preservative is in contact with the construct, significantly minimizing the associated stability risks. With liquid formulations, preservative effectiveness and stability should be maintained over the entire product shelf-life. An important point to note is that preservative effectiveness should be demonstrated in the final formulation containing the active drug and all excipient components. Once the pharmaceutical composition has been formulated, it may be stored in sterile vials as a solution, suspension, gel, emulsion, solid, crystal, or as a dehydrated or lyophilized powder. Such formulations may be stored either in a ready-to-use form or in a form (e.g., lyophilized) that is reconstituted prior to administration.

[0639] The biological activity of the pharmaceutical composition defined herein can be determined for instance by in vitro cytotoxicity assays, as described in the following examples, in WO 99/54440 or by Schlereth et al. (Cancer Immunol. Immunother. 20 (2005), 1-12). “Efficacy” or “in vivo efficacy” as used herein refers to the response to therapy by the pharmaceutical composition of formulation of the invention, using e.g. standardized NCI response criteria. The success or in vivo efficacy of the therapy using a pharmaceutical composition of the invention refers to the effectiveness of the composition for its intended purpose, i.e. the ability of the composition to cause its desired effect, i.e. depletion of pathologic cells, e.g. tumor cells. The in vivo efficacy may be monitored by established standard methods for the respective disease entities including, but not limited to, white blood cell counts, differentials, fluorescence activated cell sorting, bone marrow aspiration. In addition, various disease specific clinical chemistry parameters and other established standard methods may be used. Furthermore, computer-aided tomography, X-ray, nuclear magnetic resonance tomography, positron-emission tomography scanning, lymph node biopsies/histologies and other established standard methods may be used.

[0640] Another major challenge in the development of drugs such as the pharmaceutical composition of the invention is the predictable modulation of pharmacokinetic properties. To this end, a pharmacokinetic profile of the drug candidate, i.e. a profile of the pharmacokinetic parameters that affect the ability of a specific drug to treat a given condition, can be established. Pharmacokinetic parameters of the drug influencing the ability of a drug for treating a certain disease entity include, but are not limited to: half-life, volume of distribution, hepatic first-pass metabolism and the degree of blood serum binding. The efficacy of a given drug agent can be influenced by each of the parameters mentioned above.

[0641] “Half-life” is the time required for a quantity to reduce to half its initial value. The medical sciences refer to the half-life of substances or drugs in the human body. In a medical context, half-life may refer to the time it takes for a substance/drug to lose one-half of its activity, e.g. pharmacologic, physiologic, or radiological activity. The half-life may also describe the time that it takes for the concentration of a drug or substance (e.g., a construct of the invention) in blood plasma/serum to reach one-half of its steady-state value (“serum half-life”). Typically, the elimination or removal of an administered substance/drug refers to the body's cleansing through biological processes such as metabolism, excretion, also involving the function of kidneys and liver. The “first-pass metabolism” is a phenomenon of drug metabolism whereby the concentration of a drug is reduced before it reaches the circulation. It is the fraction of drug lost during the process of absorption. Accordingly, by “hepatic first-pass metabolism” is meant the propensity of a drug to be metabolized upon first contact with the liver, i.e. during its first pass through the liver. “Volume of distribution” (VD) means the degree to which a drug is distributed in body tissue rather than the blood plasma, a higher VD indicating a greater amount of tissue distribution. The retention of a drug can occur throughout the various compartments of the body, such as intracellular and extracellular spaces, tissues and organs, etc. “Degree of blood serum binding” means the propensity of a drug to interact with and bind to blood serum proteins, such as albumin, leading to a reduction or loss of biological activity of the drug.

[0642] Pharmacokinetic parameters also include bioavailability, lag time (T lag), Tmax, absorption rates, and/or Cmax for a given amount of drug administered. “Bioavailability” refers to the fraction of an administered dose of a drug/substance that reaches the systemic circulation (the blood compartment). When a medication is administered intravenously, its bioavailability is considered to be 100%. However, when a medication is administered via other routes (such as orally), its bioavailability generally decreases. “Lag time” means the time delay between the administration of the drug and its detection and measurability in blood or plasma. Cmax is the maximum plasma concentration that a drug achieves after its administration (and before the administration of a second dose). Tmax is the time at which Cmax is reached. The time to reach a blood or tissue concentration of the drug which is required for its biological effect is influenced by all parameters. Pharmacokinetic parameters of constructs exhibiting cross-species specificity may be determined in preclinical animal testing in non-chimpanzee primates as outlined above and set forth e.g. in Schlereth et al. (supra).

[0643] One embodiment provides the construct of the invention (or the construct produced according to the process of the invention), for the use as a medicament, particularly for the use in the prevention, treatment or amelioration (preferably treatment) of a disease, preferably a tumorous disease, more preferred a neoplasm, cancer or tumor. Another embodiment provides the use of the construct of the invention (or of the construct produced according to the process of the invention) in the manufacture of a medicament for the prevention, treatment or amelioration of a disease, preferably a tumorous disease, more preferred a neoplasm, cancer or tumor. It is also envisaged to provide a method for the prevention, treatment or amelioration of a disease, preferably a tumorous disease, more preferred a neoplasm, cancer or tumor, comprising the step of administering to a subject in need thereof the construct of the present invention (or the construct produced according to the process of the present invention). The terms “subject in need”, “patient” or those “in need of treatment” include those already with the disease, as well as those in which the disease is to be prevented. The terms also include human and other mammalian subjects that receive either prophylactic or therapeutic treatment.

[0644] The polypeptides/polypeptide constructs of the invention and the formulations/pharmaceutical compositions described herein are useful in the treatment, amelioration and/or prevention of the medical condition as described herein in a patient in need thereof. The term “treatment” refers to both therapeutic treatment and prophylactic or preventative measures. Treatment includes the application or administration of the polypeptides/polypeptide constructs/pharmaceutical composition to the body, to an isolated tissue, or to a cell from a patient or a subject in need who has a disease/disorder as described herein, a symptom of such disease/disorder, or a predisposition toward such disease/disorder, with the purpose to cure, heal, alleviate, relieve, alter, remedy, ameliorate, improve, or affect the disease, the symptom of the disease, or the predisposition toward the disease. The term “amelioration” as used herein refers to any improvement of the disease state of a patient, by the administration of a polypeptide construct according to the invention to such patient or subject in need thereof. Such an improvement may be a slowing down or stopping of the progression of the disease of the patient, and/or as a decrease in severity of disease symptoms, an increase in frequency or duration of disease symptom-free periods or a prevention of impairment or disability due to the disease. The term “prevention” as used herein means the avoidance of the occurrence or of the re-occurrence of a disease as specified herein, by the administration of a construct according to the invention to a subject in need thereof.

[0645] The term “disease” refers to any condition that would benefit from treatment with the construct or the pharmaceutical composition described herein. This includes chronic and acute disorders or diseases including those pathological conditions that predispose the mammal to the disease in question. The disease is preferably a tumorous disease, more preferred a neoplasm, cancer or tumor. The disease, neoplasm, cancer or tumor is preferably positive for a tumor antigen, preferably such as those defined herein above, i.e. it is characterized by expression or overexpression of a tumor antigen, preferably such as those defined herein above. An overexpression of a tumor antigen means that there is an increase by at least 10%, in particular at least 25%, at least 50%, at least 100%, at least 250%, at least 500%, at least 750%, at least 1000% or even more. Expression is, preferably, only found in a diseased tissue, while expression in a corresponding healthy tissue is not or significantly not detectable. According to the invention, diseases associated with cells expressing a tumor antigen, preferably such as those defined herein above, include cancer diseases. Furthermore, according to the invention, cancer diseases preferably are those wherein the cancer cells express a tumor antigen. In accordance with the invention, the disease, preferably tumorous disease, more preferred neoplasm, tumor or cancer is preferably characterized by the presence of BCMA-positive, CD123-positive, CD19-positive, CD20-positive, CD22-positive, CD33-positive, CD70-positive, CDH19-positive, CDH3-positive, CLL1-positive, CS1-positive, CLDN6-positive, CLDN18.2-positive, DLL3-positive, EGFRvIII-positive, FLT3-positive, MAGEB2-positive, MART1-positive, MSLN-positive, MUC17-positive, PSMA-positive, or STEAP1-positive cells. In other words, the tumorous disease, more preferred neoplasm, tumor or cancer is preferably associated with the presence of BCMA-positive, CD123-positive, CD19-positive, CD20-positive, CD22-positive, CD33-positive, CD70-positive, CDH19-positive, CDH3-positive, CLL1-positive, CS1-positive, CLDN6-positive, CLDN18.2-positive, DLL3-positive, EGFRvIII-positive, FLT3-positive, MAGEB2-positive, MART1-positive, MSLN-positive, MUC17-positive, PSMA-positive, or STEAP1-positive cells; the tumorous disease, more preferred neoplasm, tumor or cancer can therefore be termed a BCMA-positive, CD123-positive, CD19-positive, CD20-positive, CD22-positive, CD33-positive, CD70-positive, CDH19-positive, CDH3-positive, CLL1-positive, CS1-positive, CLDN6-positive, CLDN18.2-positive, DLL3-positive, EGFRvIII-positive, FLT3-positive, MAGEB2-positive, MART1-positive, MSLN-positive, MUC17-positive, PSMA-positive, or STEAP1-positive neoplasm, tumor or cancer. It is understood herein, that each of said tumor antigen-positive neoplasms, tumors or cancers can be prevented, treated or ameliorated using a polypeptide or polypeptide construct according to the invention that comprises a binding domain against the tumor antigen expressed by the cells with which said neoplasm, tumor or cancer is associated with. A BCMA-positive, CD123-positive, CD19-positive, CD20-positive, CD22-positive, CD33-positive, CD70-positive, CDH19-positive, CDH3-positive, CLL1-positive, CS1-positive, CLDN6-positive, CLDN18.2-positive, DLL3-positive, EGFRvII-positive, FLT3-positive, MAGEB2-positive, MART1-positive, MSLN-positive, MUC17-positive, PSMA-positive, or STEAP1-positive neoplasm, tumor or cancer can be prevented, treated or ameliorated using a polypeptide or polypeptide construct according to the invention that comprises a binding domain against BCMA (for a BCMA-positive neoplasm, tumor or cancer), CD123 (for a CD123-positive neoplasm, tumor or cancer), CD19 (for a CD19-positive neoplasm, tumor or cancer), CD20 (for a CD20-positive neoplasm, tumor or cancer), CD22 (for a CD22-positive neoplasm, tumor or cancer), CD33 (for a CD33-positive neoplasm, tumor or cancer), CD70 (for a CD70-positive neoplasm, tumor or cancer), CDH19 (for a CDH19-positive neoplasm, tumor or cancer), CDH3 (for a CDH3-positive neoplasm, tumor or cancer), CLL1 (for a CLL1-positive neoplasm, tumor or cancer), CS1 (for a CS1-positive neoplasm, tumor or cancer), CLDN6 (for a CLDN6-positive neoplasm, tumor or cancer), CLDN18.2 (for a CLDN18.2-positive neoplasm, tumor or cancer), DLL3 (for a DLL3-positive neoplasm, tumor or cancer), EGFRvIII (for a EGFRvIII-positive neoplasm, tumor or cancer), FLT3 (for a FLT3-positive neoplasm, tumor or cancer), MAGEB2 (for a MAGEB2-positive neoplasm, tumor or cancer), MART1 (for a MART1-positive neoplasm, tumor or cancer), MSLN (for a MSLN-positive neoplasm, tumor or cancer), MUC17 (for a MUC17-positive neoplasm, tumor or cancer), PSMA (for a PSMA-positive neoplasm, tumor or cancer), and STEAP1 (for a STEAP1-positive neoplasm, tumor or cancer), respectively.

[0646] A “neoplasm” is an abnormal growth of tissue, usually but not always forming a mass. When also forming a mass, it is commonly referred to as a “tumor”. Neoplasms or tumors can be benign, potentially malignant (pre-cancerous), or malignant (cancerous). Malignant neoplasms/tumors are commonly called cancer. They usually invade and destroy the surrounding tissue and may form metastases, i.e., they spread to other parts, tissues or organs of the body. A “primary tumor” is a tumor growing at the anatomical site where tumor progression began and proceeded to yield a cancerous mass. Most cancers develop at their primary site but then go on to metastasize or spread to other parts (e.g. tissues and organs) of the body. These further tumors are “secondary tumors”. Most cancers continue to be called after their primary site, even after they have spread to other parts of the body.

[0647] Lymphomas and leukemias are lymphoid neoplasms. For the purposes of the present invention, they are also encompassed by the terms “tumor” and “cancer”. For the purposes of the present invention, the terms “neoplasm”, “tumor” and “cancer” may be used interchangeably, and they comprise both primary tumors/cancers and secondary tumors/cancers (or “metastases”) as well as mass-forming neoplasms (tumors) and lymphoid neoplasms (such as lymphomas and leukemias), and minimal residual disease (MRD).

[0648] The term “minimal residual disease” (MRD) refers to the evidence for the presence of small numbers of residual cancer cells that remain in the patient after cancer treatment, e.g. when the patient is in remission (no symptoms or signs of disease). A very small number of remaining cancer cells usually cannot be detected by routine means because the standard tests used to assess or detect cancer are not sensitive enough to detect MRD. Nowadays, very sensitive molecular biology tests for MRD are available, such as flow cytometry, PCR and next-generation sequencing. These tests can measure minimal levels of cancer cells in tissue samples, sometimes as low as one cancer cell in a million normal cells. In the context of the present invention, the terms “prevention”, “treatment” or “amelioration” of a cancer are envisaged to also encompass “prevention, treatment or amelioration of MRD”, whether the MRD was detected or not.

[0649] The construct of the invention will generally be designed for specific routes and methods of administration, for specific dosages and frequencies of administration, for specific treatments of specific diseases, with ranges of bio-availability and persistence, among other things. The materials of the composition are preferably formulated in concentrations that are acceptable for the site of administration. Formulations and compositions thus may be designed in accordance with the invention for delivery by any suitable route of administration. In the context of the present invention, the routes of administration include, but are not limited to topical routes, enteral routes and parenteral routes.

[0650] If the pharmaceutical composition has been lyophilized, the lyophilized material is first reconstituted in an appropriate liquid prior to administration. The lyophilized material may be reconstituted in, e.g., bacteriostatic water for injection (BWFI), physiological saline, phosphate buffered saline (PBS), or the same formulation the protein had been in prior to lyophilization. The pharmaceutical compositions and the construct of this invention are particularly useful for parenteral administration, e.g., intravenous delivery, for example by injection or infusion. Pharmaceutical compositions may be administered using a medical device. Examples of medical devices for administering pharmaceutical compositions are described in U.S. Pat. Nos. 4,475,196; 4,439,196; 4,447,224; 4,447,233; 4,486,194; 4,487,603; 4,596,556; 4,790,824; 4,941,880; 5,064,413; 5,312,335; 5,312,335; 5,383,851; and 5,399,163.

[0651] The compositions of the present invention can be administered to the subject at a suitable dose which can be determined e.g. in dose escalating studies. As set forth above, the construct of the invention exhibiting cross-species specificity as described herein can also be advantageously used in in preclinical testing in non-chimpanzee primates. The dosage regimen will be determined by the attending physician and clinical factors. As is well known in the medical art, dosages for any one patient depend upon many factors, including the patient's size, body surface area, age, the specific compound to be administered, sex, time and route of administration, general health, and other drugs being administered concurrently.

[0652] An “effective dose” is an amount of a therapeutic agent that is sufficient to achieve or at least partially achieve a desired effect. A “therapeutically effective dose” is an amount that is sufficient to cure or at least partially arrest the disease and its complications, signs and symptoms in a patient suffering from the disease. Amounts or doses effective for this use will depend on the disease to be treated (the indication), the delivered construct, the therapeutic context and objectives, the severity of the disease, prior therapy, the patient's clinical history and response to the therapeutic agent, the route of administration, the size (body weight, body surface) and/or condition (the age and general health) of the patient, and the general state of the patient's own immune system. The proper dose can be adjusted according to the judgment of the attending physician, to obtain the optimal therapeutic effect.

[0653] A therapeutically effective amount of a construct of the invention preferably results in a decrease in severity of disease symptoms, an increase in frequency or duration of disease symptom-free periods or a prevention of impairment or disability due to the disease. In the treatment of tumor antigen-expressing tumors, a therapeutically effective amount of the construct of the invention comprising a binding domain against said tumor antigen preferably inhibits tumor cell growth by at least about 20%, at least about 40%, at least about 50%, at least about 60%, at least about 70%, at least about 80%, or at least about 90% relative to untreated patients. The ability of a compound to inhibit tumor growth may also be evaluated in an animal model predictive of efficacy in human tumors.

[0654] In a further embodiment, the invention provides a kit comprising a construct of the invention, a construct produced according to the process of the invention, a polynucleotide of the invention, a vector of the invention, and/or a host cell of the invention. In the context of the present invention, the term “kit” means two or more components—one of which corresponding to the construct, the pharmaceutical composition, the polynucleotide, the vector or the host cell of the invention—packaged together in a container, recipient or otherwise. A kit can hence be described as a set of products and/or utensils that are sufficient to achieve a certain goal, which can be marketed as a single unit.

[0655] It is envisaged that a further component of the kit of the invention is an agent, preferably an antibody or construct, which binds to a protein of the immune checkpoint pathway (such as PD-1 or CTLA-4) or to a co-stimulatory immune checkpoint receptor (such as 4-1BB). These agents are described in more detail herein above. According to one embodiment, the kit comprises a construct of the invention and an antibody or construct which binds to PD-1. Anti-PD-1 binding proteins useful for this purpose are e.g. described in detail in PCT/US2019/013205. In certain embodiment, the kit allows for the simultaneous and/or sequential administration of the components.

[0656] The kit may comprise one or more recipients (such as vials, ampoules, containers, syringes, bottles, bags) of any appropriate shape, size and material (preferably waterproof, e.g. plastic or glass) containing the construct or the pharmaceutical composition of the present invention in an appropriate dosage for administration (see above). The kit may additionally contain directions for use (e.g. in the form of a leaflet or instruction manual), means for administering the construct or the pharmaceutical composition of the present invention such as a syringe, pump, infuser or the like, means for reconstituting the construct of the invention and/or means for diluting the construct of the invention.

[0657] The invention also provides kits for a single-dose administration unit. The kit of the invention may also contain a first recipient comprising a dried/lyophilized construct or pharmaceutical composition and a second recipient comprising an aqueous formulation. In certain embodiments of this invention, kits containing single-chambered and multi-chambered pre-filled syringes are provided.

[0658] Whenever the term “construct” is used herein, said term refers to the used polypeptide/polypeptide constructs of the invention or controls thereof as indicated.

[0659] As used herein, the singular forms “a”, “an”, and “the” include plural references unless the context clearly indicates otherwise. Thus, for example, reference to “a reagent” includes one or more of such different reagents and reference to “the method” includes reference to equivalent steps and methods known to those of ordinary skill in the art that could be modified or substituted for the methods described herein.

[0660] Unless otherwise indicated, the term “at least” preceding a series of elements is to be understood to refer to every element in the series. Those skilled in the art will recognize or be able to ascertain using no more than routine experimentation, many equivalents to the specific embodiments of the invention described herein. Such equivalents are intended to be encompassed by the present invention.

[0661] The term “and/or” wherever used herein includes the meaning of “and”, “or” and “all or any other combination of the elements connected by said term”.

[0662] The term “about” or “approximately” as used herein means within ±20%, preferably within +15%, more preferably within +10%, and most preferably within ±5% of a given value or range. It also includes the concrete value, e.g., “about 50” includes the value “50”.

[0663] Throughout this specification and the claims, unless the context requires otherwise, the word “comprise”, and variations such as “comprises” and “comprising”, will be understood to imply the inclusion of a stated integer or step or group of integers or steps but not the exclusion of any other integer or step or group of integer or step. When used herein the term “comprising” can be substituted with the term “containing” or “including” or sometimes when used herein with the term “having”.

[0664] When used herein “consisting of” excludes any element, step, or ingredient not specified in the claim element. When used herein, “consisting essentially of” does not exclude materials or steps that do not materially affect the basic and novel characteristics of the claim.

[0665] In each instance herein, any of the terms “comprising”, “consisting essentially of” and “consisting of” may be replaced with either of the other two terms.

[0666] The above description and the below examples provide exemplary arrangements, but the present invention is not limited to the specific methodologies, techniques, protocols, material, reagents, substances, etc., described herein and as such can vary. The terminology used herein serves to describe specific embodiments only. The terminology used herein does not intend to limit the scope of the present invention, which is defined solely by the claims. Aspects of the invention are provided in the independent claims. Some optional features of the invention are provided in the dependent claims.

[0667] All publications and patents cited throughout the text of this specification (including all patents, patent applications, scientific publications, manufacturer's specifications, instructions, etc.), whether supra or infra, are hereby incorporated by reference in their entirety. Nothing herein is to be construed as an admission that the invention is not entitled to antedate such disclosure by virtue of prior invention. To the extent the material incorporated by reference contradicts or is inconsistent with this specification, the specification will supersede any such material.

[0668] A better understanding of the present invention and of its advantages will be obtained from the following examples, offered for illustrative purposes only. The examples are not intended and should not be construed as to limit the scope of the present invention in any way.

### BRIEF DESCRIPTION OF THE DRAWINGS

[0669] FIG. 1 A): Effector cells: human unstimulated T cells; Target cells: CHO hu CD70 pEFDHR

[0670] Legend:

[0671] I2C: CD70 1-A9D CC×I2C×scFc

[0672] I2CA: CD70 1-A9D CC×I2C H109A×scFc

[0673] 8A8.04: CD70 1-A9D CC×8A8.04×scFc

[0674] 5C3.04: CD70 1-A9D CC×5C3.04×scFc

[0675] I2E: CD70 1-A9D CC×5C3.01×scFc

[0676] I2K: CD70 1-A9D CC×5G6.05×scFc

[0677] 5G6.04: CD70 1-A9D CC×5G6.04×scFc

[0678] 5G6.03: CD70 1-A9D CC×5G6.03×scFc

[0679] 1D5.04: CD70 1-A9D CC×1D5.04×scFc

[0680] 8A8.02: CD70 1-A9D CC×8A8.02×scFc

[0681] 1D5.03: CD70 1-A9D CC×1D5.03×scFc

[0682] FIG. 1 B): Effector cells: human unstimulated T cells; Target cells: hu orl FLT3 v1 co CHO #12

[0683] Legend:

[0684] I2C: FL 7-H3 CC×I2C×scFc

[0685] 5G6.04: FL 7-H3 CC×5G6.04×scFc

[0686] 8A8.04: FL 7-H3 CC×8A8.04×scFc

[0687] 5C3.04: FL 7-H3 CC×5C3.04×scFc

[0688] I2E: FL 7-H3 CC×5C3.01×scFc

[0689] I2K: FL 7-H3 CC×5G6.05×scFc

[0690] I2C CC 44/100: FL 7-H3 CC×I2C CC 44/100×scFc

### EXAMPLES

### Example 1: Thermal Stability

[0691] Purified monomeric BiTE® protein at 1 mg/ml formulated in screening buffer was analysed. Thermal stability was determined by Dynamic Light Scattering DLS and Differential Scanning Fluorometry DSF.

[0692] DLS

[0693] 100 μl protein solution were transferred in doubles in a multi well plate, overlaid with paraffin oil and placed in a DLS plate reader (DynaPro Plate Reader II with temperature control, Wyatt Technology Europe GmbH, Dernbach—Germany). Thermal stability was determined in a linear increasing temperature scan from 40° C. to 70° C. while measuring the hydrodynamic radius at the different temperatures in this range. Aggregation temperature was defined at the temperature the radius begins to expand. The mean of both determined aggregation temperatures was calculated and used for candidate ranking.

[0694] DSF

[0695] Three glass capillaries were filled each with approx. 40 μl protein solution and placed simultaneously into a DSF reader with temperature control (Prometheus nanoDSF, NanoTemper Technologies GmbH, Munich—Germany). Protein internal fluorescence was measured at an excitation wavelength of 280 nm and emission wavelengths 330 and 350 nm in a linear increasing temperature scan from 20° C. to 95° C. Changes in the ratio of the two emission wavelength intensities indicate conformational changes in the protein therefore showing the melting temperature(s) of the analyzed BiTE proteins. The first maximum of the first derivate of the ratio 350/330 nm curve was defined as first melting temperature. The mean of all three determined first melting temperatures was calculated and used for candidate ranking.

[0696] The incorporation of specific amino acid mutations in the sequence of the anti-CD3 binder I2C (VH and VL defined in SEQ ID NO: 1854 and 1855, respectively, and linked with a peptide linker of SEQ ID NO: 2; CD70 target binder VH and VL defined in SEQ ID NOs: 2185 and 2186, respectively, and linked with a peptide linker of SEQ ID NO: 2; CD70 binding domain linked to CD3 binding domain with linker of SEQ ID NO: 6; HLE domain as specified in SEQ ID NO: 18 linked with a G4 linker to the C-terminus of the VL region of the CD3 binder; CD70 binding domain is at the N-terminus, followed by the CD3 binding domain with the HLE domain at the C-terminus of the BiTE® molecule) in the BiTE-HLE context resulted in aggregation temperature values of 57.5° C. to 62.0° C. determined by Dynamic Light Scattering (DLS) and melting temperature values of 62.9° C. to 70.3° C. determined by Differential scanning Fluorometry (DSF). The BiTE-HLE molecules harboring the I2C variants showed an aggregation temperature increase of 2.3° C. to 6.8° C. in comparison to the unmodified I2C. The same effect was observed in the melting temperature measurements of the I2C variants resulting in an increase of 2.1° C. to 9.5° C. as compared to the unmodified I2E.

[0697] Also the BiTE-HLE construct containing the anti-CD3 binder variant 12 CC44/100, in which an additional disulfide bond was engineered for stabilizing (Reiter, Y. et al., 1994) by replacing the amino acid residues with Cysteine residues at position 44 in the heavy chain variable region and at position 100 in the light chain variable region (numbering scheme according to Kabat et al., 1991), showed a thermostability increase of 3.2° C. for DLS and 5.3° C. for DSF as compared to the unmodified 120. However, said BiTE-HLE construct exhibited a significantly decreased cytotoxic activity (see further example) resulting in a construct which is therefore not suitable for further development and use as a part of T cell engagers.

TABLE 2
Aggregation and melting temperatures of BiTE-HLE molecules
harboring various CD3 binding domains determined
by Dynamic Light Scattering (DLS) or Differential
scanning Fluorometry (DSF), respectively.

| | Thermostability | | |
|---|---|---|---|
| CD3 binder | DLS | DSF | CD3 binding domain |
| in CD70 BITE- | aggregation | melting | SEQ ID NOs: VH, VL, |
| HLE | [° C.] | [° C.] | linker |
| I2E | 59.4 | 68.7 | 2012, 2013, 2 |
| I2K | 58.8 | 64.6 | 2020, 2021, 2 |
| I2L | 60.4 | 69.3 | 2028, 2029, 2 |
| I2M | 60.3 | 67.3 | 2036, 2037, 2 |
| I2M2 | 58.9 | 66.9 | 2044, 2045, 2 |
| 1D5.01 | 62.0 | 70.3 | 42, 43, 2 |
| 1D5.03 | 61.5 | 70.0 | 50, 51, 2 |
| 1D5.04 | 61.8 | 69.7 | 58, 59, 2 |
| 4G10.04 | 59.4 | 66.0 | 66, 67, 2 |
| 5B1.05 | 58.6 | 67.8 | 74, 75, 2 |
| 5B1.09 | 58.8 | 68.2 | 82, 83, 2 |
| 5C3.04 | 60.6 | 69.2 | 90, 91, 2 |
| 5C3.05 | 60.5 | 69.2 | 98, 99, 2 |
| 5G6.03 | 60.1 | 67.4 | 100, 101, 2 |
| 5G6.04 | 59.3 | 65.5 | 108, 109, 2 |
| 6H10.03 | 60.0 | 67.3 | 116, 117, 2 |
| 8A8.02 | 59.4 | 65.9 | 26, 27, 2 |
| 8A8.04 | 59.3 | 67.0 | 34, 35, 2 |
| I2C CC44/100 | 58.4 | 66.1 | |
| I2C H109A | 57.5 | 62.9 | 2560, 2561, 2 |
| I2C | 55.2 | 60.8 | 1854, 1855, 2 |

[0698] The mutation of single or more amino acids in the sequence of the anti-SD3 binder I2C in the BiTE-HLE context resulted in aggregation temperature values of 57.0° C. to 62.4C determined by Dynamic Light Scattering (DLS) and melting temperature values of 62.1° C. to 68.8° C. determined by Differential scanning Fluorometry (DSF). The BiTE-HLE molecules harboring the I2C mutants showed an aggregation temperature increase of 1.0° C. to 7.2° C. in comparison to the unmodified 120. The same effect was observed in the melting temperature measurements of the I2C mutants resulting in an increase of 1.0° C. to 7.7° C. as compared to the unmodified I2C. The CD3 binder as referenced in the below Table specifies the amino acid residue exchanges and their positions in the first column; for each entry it is shown in brackets the positions as used in reference to the base sequence of the VH region sequence as defined in SEQ ID NO: 1854 and the VL region sequence as defined in SEQ ID NO: 1855 which is the authoritative nomenclature in accordance with the invention.

TABLE 3

| | | | CD3 |
|---|---|---|---|
| | | | binding |
| | Thermostability | | domain |
| | DLS | DSF | SEQ ID |
| CD3 binder | aggregation | melting | NOs: VH, |
| in CD70 BITE-HLE | [° C.] | [° C.] | VL, linker |
| I2C_HC_A89V_V107A_LC_L21I_Q46K_L83S_G141S | 61.0 | 68.8 | |
| (I2C_HC_A81V_V99A_LC_L20I_Q40K_L69S_G102S) | | | |
| I2C_HC_M41I_A89V_LC_L21I_Q46K_G141S | 62.4 | 68.6 | 1898, 1899, |
| (I2C_HC_M34I_A81V_LC_L20I_Q40K_G102S) | | | 2 |
| I2C_HC_M41I_LC_L21I_Q46K_G141S | 61.9 | 68.3 | 1904, 1905, |
| (I2C_HC_M34I_LC_L20I_Q40K_G102S) | | | 2 |
| I2C_HC_M41I_Q46E_A89V_LC_L21I_Q46K_G141S | 61.4 | 68.2 | 1906, 1907, |
| (I2C_HC_M34I_Q39E_A81V_LC_L20I_Q40K_G102S) | | | 2 |
| I2C_HC_M41I_A89V_LC_Q46K | 60.5 | 66.6 | 1900, 1901, |
| (I2C_HC_M34I_A81V_LC_Q40K) | | | 2 |
| I2C_HC_L52M_LC_L21I_Q46K_G141S | 58.6 | 65.7 | 1866, 1867, |
| (I2C_HC_L45M_LC_L20I_Q40K_G102S) | | | 2 |
| I2C_HC_M41I_S73A_H109A_N114S | 59.0 | 65.4 | |
| (I2C_HC_M34I_S65A_H101A_N106S) | | | |
| I2C_LC_L21I_Q46K_L83S_G141S | 59.0 | 65.3 | |
| (I2C_LC_L20I_Q40K_L69S_G102S) | | | |
| I2C_HC_M41F_A89V (I2C_HC_M34F_A81V) | 59.3 | 65.0 | 1884, 1885, |
| | | | 2 |
| I2C_HC_L52M_LC_Q46K_G141S | 59.5 | 65.0 | 1870, 1871, |
| (I2C_HC_L45M_LC_Q40K_G102S) | | | 2 |
| I2C_HC_Q46D_LC_L21I_Q46K_G141S | 58.3 | 64.7 | 1918 |
| (I2C_HC_Q39D_LC_L20I_Q40K_G102S) | | | 1919, 2 |
| I2C_HC_M41I_A89V (I2C_HC_M34I_A81V) | 59.1 | 64.3 | 1896, 1897, |
| | | | 2 |
| I2C_HC_Q46E_LC_L21I_Q46K_G141S | 58.9 | 64.3 | 1932, 1933, |
| (I2C_HC_Q39E_LC_L20I_Q40K_G102S) | | | 2 |
| I2C_HC_L52M_LC_Q46K | 58.9 | 64.3 | 1868, 1869. |
| (I2C_HC_L45M_LC_Q40K) | | | 2 |
| I2C_HC_M41I_S73A_A89V_V107A_H109A_N114S | 58.1 | 64.2 | |
| (I2C_HC_M34I_S65A_A81V_V99A_H101A_N106S) | | | |
| I2C_HC_Q46D_LC_L21I_Q46R_G141S | 58.2 | 63.7 | 1928, 1929, |
| (I2C_HC_Q39D_LC_L20I_Q40R_G102S) | | | 2 |
| I2C_HC_M41I (I2C_HC_M34I) | 58.2 | 63.6 | 1892, 1893, |
| | | | 2 |
| I2C_LC_Q46K (I2C_LC_Q40K) | 58.4 | 63.5 | 1974, 1975, |
| | | | 2 |
| I2C_HC_Q46D_LC_Q46K_G141S | 58.2 | 63.5 | 1922, 1923, |
| (I2C_HC_Q39D_LC_Q40K_G102S) | | | 2 |
| I2C_LC_L21I_G141S (I2C_LC_L20I_G102S) | 57.4 | 63.2 | |
| I2C_HC_Q46K (I2C_HC_Q39K) | 57.4 | 63.2 | 1944, 1945, |
| | | | 2 |
| I2C_HC_Q46E_LC_Q46K_G141S | 58.0 | 63.2 | 1938, 1939, |
| (I2C_HC_Q39E_LC_Q40K_G102S) | | | 2 |
| I2C_HC_Q46E_LC_L21I_Q46R_G141S | 57.9 | 63.0 | 1934, 1935, |
| (I2C_HC_Q39E_LC_L20I_Q40R_G102S) | | | 2 |
| I2C_HC_Q46D_LC_Q46R_G141S | 57.3 | 62.9 | 1926, 1927, |
| (I2C_HC_Q39D_LC_Q40R_G102S) | | | 2 |
| I2C_HC_A89V (I2C_HC_A81V) | 58.2 | 62.9 | 1862, 1863, |
| | | | 2 |
| I2C_HC_Q46D_LC_Q46K | 57.1 | 62.8 | 1920, 1921, |
| (I2C_HC_Q39D_LC_Q40K) | | | 2 |
| I2C_HC_W136F (I2C_HC_W112F) | 57.0 | 62.7 | 1958, 1959, |
| | | | 2 |
| I2C_HC_W136F_LC_V44I | 57.8 | 62.4 | 1960, 1961, |
| (I2C_HC_W112F_LC_V38I) | | | 2 |
| I2C_HC_Q46E_LC_Q46K | 58.2 | 62.3 | 1936, 1937, |
| (I2C_HC_Q39E_LC_Q40K) | | | 2 |
| I2C_HC_M41V (I2C_HC_M34V) | 57.6 | 62.1 | 1914, 1915, |
| | | | 2 |
| I2C | 55.2 | 60.8 | |

Aggregation and melting temperatures of BiTE-HLE molecules harboring the CD3 binding domain “I2C” (SEQ ID NO: 1854 and 1855, respectively, linked by peptide linker (G₄S)3 (SEQ ID NO: 2)), respectively) with several amino acid mutations determined by Dynamic Light Scattering (DLS) or Differential scanning Fluorometry (DSF), respectively, as described herein above.

### Example 2: Cytotoxic Activity

[0699] Cytotoxic Activity

[0700] Human peripheral blood mononuclear cells (PBMC) were prepared by Ficoll density gradient centrifugation from enriched lymphocyte preparations (buffy coats), a side product of blood banks collecting blood for transfusions. Buffy coats were supplied by a local blood bank and PBMC were prepared on the same day of blood collection. After Ficoll density centrifugation and extensive washes with Dulbecco's PBS (Gibco), remaining erythrocytes were removed from PBMC via incubation with erythrocyte lysis buffer (155 mM NH₄Cl, 10 mM KHCO₃, 100 μM EDTA). Platelets were removed via the supernatant upon centrifugation of PBMC at 100×g. Remaining lymphocytes mainly encompass B and T lymphocytes, NK cells and monocytes. PBMC were kept in culture at 37° C./5% CO₂ in RPMI medium (Gibco) with 10% FCS (Gibco).

[0701] Depletion of CD14⁺ and CD56⁺ Cells

[0702] For depletion of CD14⁺ cells, human CD14 MicroBeads (Milteny Biotec, MACS, #130-050-201) were used, for depletion of NK cells human CD56 MicroBeads (MACS, #130-050-401). PBMC were counted and centrifuged for 10 min at room temperature with 300×g. The supernatant was discarded and the cell pellet resuspended in MACS isolation buffer [80 μL/10⁷ cells; PBS (Invitrogen, #20012-043), 0.5% (v/v) FBS (Gibco, #10270-106), 2 mM EDTA (Sigma-Aldrich, #E-6511)]. CD14 MicroBeads and CD56 MicroBeads (20 μL/10⁷ cells) were added and incubated for 15 min at 4-8° C. The cells were washed with MACS isolation buffer (1-2 mL/10⁷ cells). After centrifugation (see above), supernatant was discarded and cells resuspended in MACS isolation buffer (500 μL/10⁸ cells). CD14/CD56 negative cells were then isolated using LS Columns (Miltenyi Biotec, #130-042-401). PBMC w/o CD14+/CD56+ cells were cultured in RPMI complete medium i.e. RPMI1640 (Biochrom AG, #FG1215) supplemented with 10% FBS (Biochrom AG, #S0115), 1×non-essential amino acids (Biochrom AG, #K0293), 10 mM Hepes buffer (Biochrom AG, #L1613), 1 mM sodium pyruvate (Biochrom AG, #L0473) and 100 U/mL penicillin/streptomycin (Biochrom AG, #A2213) at 37° C. in an incubator until needed.

[0703] Target Cell Labeling

[0704] For the analysis of cell lysis in flow cytometry assays, the fluorescent membrane dye DiOC₁₈ (DiO) (Molecular Probes, #V22886) was used to label human target-transfected CHO cells as target cells and distinguish them from effector cells. Briefly, cells were harvested, washed once with PBS and adjusted to 10⁶ cell/mL in PBS containing 2% (v/v) FBS and the membrane dye DiO (5 μL/10⁶ cells). After incubation for 3 min at 37° C., cells were washed twice in complete RPMI medium and the cell number adjusted to 1.25×10⁵ cells/mL. The vitality of cells was determined using the NC-250 cell counter (Chemometec).

[0705] Flow Cytometry Based Analysis

[0706] This assay was designed to quantify the lysis of human target-transfected CHO cells in the presence of serial dilutions of anti-target multi-specific constructs. Equal volumes of DiO-labeled target cells and effector cells (i.e., PBMC w/o CD14⁺ and CD56⁺ cells) were mixed, resulting in an E:T cell ratio of 10:1. 80 μl of this suspension were transferred to each well of a 96-well plate. 20 μL of serial dilutions of the anti-target×anti-CD3 multi-specific constructs and a negative control (a CD3-based multi-specific construct recognizing an irrelevant target antigen) or RPMI complete medium as an additional negative control were added. The multi-specific construct-mediated cytotoxic reaction proceeded for 48 hours in a 7% CO₂ humidified incubator. Then cells were transferred to a new 96-well plate and loss of target cell membrane integrity was monitored by adding propidium iodide (PI) at a final concentration of 1 pg/mL. PI is a membrane impermeable dye that normally is excluded from viable cells, whereas dead cells take it up and become identifiable by fluorescent emission.

[0707] Samples were measured by flow cytometry on an iQue Plus instrument and analyzed by Forecyt software (both from Intellicyt). Target cells were identified as DiO-positive cells. PI-negative target cells were classified as living target cells. Percentage of cytotoxicity was calculated according to the following formula:

$$Cytotoxicity [ \% ] = \frac{{n}_{dead target cells}}{{n}_{target cells}} \times 100$$

$$n = number of events$$

Using GraphPad Prism 6 software (Graph Pad Software, San Diego), the percentage of cytotoxicity was plotted against the corresponding bispecific construct concentrations. Dose response curves were analyzed with the four parametric logistic regression models for evaluation of sigmoid dose response curves with fixed hill slope and EC50 values were calculated.

[0708] Results:

TABLE 4
EC50 values in pM of T-cell engager with different anti-CD3 scFvs

| | EC50 [pM] |
|---|---|
| I2C | 0.2 |
| I2CA | 1.2 |
| 8A8.04 | 0.1 |
| 5C3.04 | 0.1 |
| I2E | 0.05 |
| I2K | 0.1 |
| 5G6.04 | 0.1 |
| 5G6.03 | 0.1 |
| 1D5.04 | 0.4 |
| 8A8.02 | 0.1 |
| 1D5.03 | 0.2 |

[0709] T-cell engager with anti-CD3 scFvs I2C, I2CA, 8A8.04, 5C3.04, 12E, I2K, 5G6.04, 5G6.03, 1D5.04, 8A8.02 and 1D5.03 show similar EC50 values in range from 0.05 pM to 0.4 pM (FIG. 1 A) and Table 4).

TABLE 5
EC50 values in pM of T-cell engager with different anti-CD3 scFvs

| | EC50 [pM] |
|---|---|
| I2C | 5.3 |
| 5G6.04 | 5.1 |
| 8A8.04 | 7.0 |
| I2E | 4.5 |
| I2K | 4.5 |
| I2C CC 44/100 | 1578 |

[0710] T-cell engager with anti-CD3 scFvs I2C, 5G6.04, 8A8.04, 12E and I2K show similar EC50 values in the range from 4.5 pM to 7.0 pM. T-cell engager with anti-CD3 scFv I2C CC 44/100 shows an EC50 value of 1578 pM and is 297-fold less active compared to T-cell engager with anti-CD3 scFv I2C (FIG. 1 B) and Table 5).

### Sequences

[0711] The below sequence list is the authoritative list for SEQ ID NOs referred to in the specification text and claims and may contain (a) gap(s) as to consecutive numbering. Any further list, such as the list complying with WIPO Standard ST.25 that contains consecutive numberings has been generated of this list and the difference in Sequence numbers is to be reconciled with the below list. Sequence identity can be identified without further ado by reference to the unique entry in the second column identified as “designation” as well as a sequence alignment:

| SEQ | | | |
|---|---|---|---|
| ID | | | |
| NO: | Designation | Organism | Sequence |
| 1 | (G4S)10- | artificial | GGGGGGGGSGGGGSGGGGSGGGGSGGGGSGGGGSGGGGSGGGGSGGGGS |
| | Linker | | |
| 2 | (G4S)3- | artificial | GGGGSGGGGSGGGGS |
| | Linker | | |
| 3 | G(EAAAK)10- | artificial | GEAAAKEAAAKEAAAKEAAAKEAAAKEAAAKEAAAKEAAAKEAAAKEAAAK |
| | Linker | | |
| 4 | G4-Linker | artificial | GGGG |
| 5 | G4Q- | artificial | GGGGQ |
| | Linker | | |
| 6 | G4S- | artificial | GGGGS |
| | Linker | | |
| 7 | S(G4S)10 | artificial | SGGGGSGGGGSGGGGSGGGGSGGGGSGGGGSGGGGSGGGGSGGGGSGGGGS |
| | Linker | | |
| 8 | S(G4S)3- | artificial | SGGGGSGGGGSGGGGS |
| | Linker | | |
| 9 | SG(EAAAK)10- | artificial | SGEAAAKEAAAKEAAAKEAAAKEAAAKEAAAKEAAAKEAAAKEAAAKEAAAK |
| | Linker | | |
| 10 | SG4Q- | artificial | SGGGGQ |
| | Linker | | |
| 11 | SG4S- | artificial | SGGGGS |
| | Linker | | |
| 12 | (EAAAK)10- | artificial | EAAAKEAAAKEAAAKEAAAKEAAAKEAAAKEAAAKEAAAKEAAAKEAAAK |
| | Spacer | | |
| 13 | (G4S)10- | artificial | GGGGSGGGGSGGGGSGGGGSGGGGSGGGGSGGGGSGGGGSGGGGSGGGGS |
| | Spacer | | |
| 14 | 2x scFc- | artificial | DKTHTCPPCPAPELLGGPSVFLFPPKPKDTLMISRTPEVTCVVVDVSHEDPEVKENWY |
| | Spacer | | VDGVEVHNAKTKPCEEQYGSTYRCVSVLTVLHQDWLNGKEYKCKVSNKALPAPIEKTI |
| | | | SKAKGQPREPQVYTLPPSREEMTKNQVSLTCLVKGFYPSDIAVEWESNGQPENNYKTT |
| | | | PPVLDSDGSFFLYSKLTVDKSRWQQGNVFSCSVMHEALHNHYTQKSLSLSPGKGGGGS |
| | | | GGGGSGGGGSGGGGSGGGGSGGGGSDKTHTCPPCPAPELLGGPSVFLFPPKPKDTLMI |
| | | | SRTPEVTCVVVDVSHEDPEVKFNWYVDGVEVHNAKTKPCEEQYGSTYRCVSVLTVLHQ |
| | | | DWLNGKEYKCKVSNKALPAPIEKTISKAKGQPREPQVYTLPPSREEMTKNQVSLTCLV |
| | | | KGFYPSDIAVEWESNGQPENNYKTTPPVLDSDGSFFLYSKLTVDKSRWQQGNVFSCSV |
| | | | MHEALHNHYTQKSLSLSPGKDKTHTCPPCPAPELLGGPSVFLFPPKPKDTLMISRTPE |
| | | | VTCVVVDVSHEDPEVKFNWYVDGVEVHNAKTKPCEEQYGSTYRCVSVLTVLHQDWLNG |
| | | | KEYKCKVSNKALPAPIEKTISKAKGQPREPQVYTLPPSREEMTKNQVSLTCLVKGFYP |
| | | | SDIAVEWESNGQPENNYKTTPPVLDSDGSFFLYSKLTVDKSRWQQGNVFSCSVMHEAL |
| | | | HNHYTQKSLSLSPGKGGGGSGGGGSGGGGSGGGGSGGGGSGGGGSDKTHTCPPCPAPE |
| | | | LLGGPSVFLFPPKPKDTLMISRTPEVTCVVVDVSHEDPEVKENWYVDGVEVHNAKTKP |
| | | | CEEQYGSTYRCVSVLTVLHQDWLNGKEYKCKVSNKALPAPIEKTISKAKGQPREPQVY |
| | | | TLPPSREEMTKNQVSLTCLVKGFYPSDIAVEWESNGQPENNYKTTPPVLDSDGSFFLY |
| | | | SKLTVDKSRWQQGNVFSCSVMHEALHNHYTQKSLSLSPGK |
| 15 | G4S- | artificial | GGGGS |
| | Spacer | | |
| 16 | Human Serum | artificial | DAHKSEVAHRFKDLGEENFKALVLIAFAQYLQQCPFEDHVKLVNEVTEFAKTCVADES |
| | Albumin | | AENCDKSLHTLFGDKLCTVATLRETYGEMADCCAKQEPERNECFLQHKDDNPNLPRLV |
| | (HSA)- | | RPEVDVMCTAFHDNEETFLKKYLYEIARRHPYFYAPELLFFAKRYKAAFTECCQAADK |
| | Spacer | | AACLLPKLDELRDEGKASSAKQRLKCASLQKFGERAFKAWAVARLSQRFPKAEFAEVS |
| | | | KLVTDLTKVHTECCHGDLLECADDRADLAKYICENQDSISSKLKECCEKPLLEKSHCI |
| | | | AEVENDEMPADLPSLAADFVESKDVCKNYAEAKDVFLGMFLYEYARRHPDYSVVLLLR |
| | | | LAKTYETTLEKCCAAADPHECYAKVEDEFKPLVEEPQNLIKQNCELFEQLGEYKFQNA |
| | | | LLVRYTKKVPQVSTPTLVEVSRNLGKVGSKCCKHPEAKRMPCAEDYLSVVLNQLCVLH |
| | | | EKTPVSDRVTKCCTESLVNRRPCFSALEVDETYVPKEFNAETFTFHADICTLSEKERQ |
| | | | IKKQTALVELVKHKPKATKEQLKAVMDDFAAFVEKCCKADDKETCFAEEGKKLVAASQ |
| | | | AALGL |
| 17 | PD1 (ECM | artificial | LDSPDRPWNPPTFSPALLVVTEGDNATFTCSFSNTSESFVLNWYRMSPSNQTDKLAAF |
| | 25-167) | | PEDRSQPGQDCRFRVTQLPNGRDFHMSVVRARRNDSGTYLCGAISLAPKAQIKESLRA |
| | Spacer | | ELRVTERRAEVPTAHPSPSPRPAGQFQ |
| 18 | ScFc- | artificial | DKTHTCPPCPAPELLGGPSVFLFPPKPKDTLMISRTPEVTCVVVDVSHEDPEVKENWY |
| | Spacer | | VDGVEVHNAKTKPCEEQYGSTYRCVSVLTVLHQDWLNGKEYKCKVSNKALPAPIEKTI |
| | | | SKAKGQPREPQVYTLPPSREEMTKNQVSLTCLVKGFYPSDIAVEWESNGQPENNYKTT |
| | | | PPVLDSDGSFFLYSKLTVDKSRWQQGNVFSCSVMHEALHNHYTQKSLSLSPGKGGGGS |
| | | | GGGGSGGGGSGGGGSGGGGSGGGGSDKTHTCPPCPAPELLGGPSVFLFPPKPKDTLMI |
| | | | SRTPEVTCVVVDVSHEDPEVKFNWYVDGVEVHNAKTKPCEEQYGSTYRCVSVLTVLHQ |
| | | | DWLNGKEYKCKVSNKALPAPIEKTISKAKGQPREPQVYTLPPSREEMTKNQVSLTCLV |
| | | | KGFYPSDIAVEWESNGQPENNYKTTPPVLDSDGSFFLYSKLTVDKSRWQQGNVFSCSV |
| | | | MHEALHNHYTQKSLSLSPGK |
| 19 | scFc_mod GQ- | artificial | CPPCPAPELLGGPSVFLFPPKPKDTLMISRTPEVTCVVVDVSHEEPEVKENWYVDGVE |
| | Spacer | | VHNAKTKPCEEQYGSTYRCVSVLTVLHQDWLNGKEYKCKVSNKALPAPIEKTISKAKG |
| | | | QPREPQVYTLPPSREEMTKNQVSLTCLVKGFYPSDIAVEWESNGQPENNYKTTPPVLD |
| | | | SDGSFFLYSKLTVDKSRWQQGNVFSCSVMHEALHNHYTQKSLSLSPGKGGGGQGGGGQ |
| | | | GGGGQGGGGQGGGGQGGGGQCPPCPAPELLGGPSVFLFPPKPKDTLMISRTPEVTCVV |
| | | | VDVSHEEPEVKFNWYVDGVEVHNAKTKPCEEQYGSTYRCVSVLTVLHQDWLNGKEYKC |
| | | | KVSNKALPAPIEKTISKAKGQPREPQVYTLPPSREEMTKNQVSLTCLVKGFYPSDIAV |
| | | | EWESNGQPENNYKTTPPVLDSDGSFFLYSKLTVDKSRWQQGNVFSCSVMHEALHNHYT |
| | | | QKSLSLSPGK |
| 20 | 16278-A8.2- | artificial | KYAIN |
| | HCDR1 | | |
| 21 | 16278-A8.2- | artificial | RIRSKYNNYATYYADAVKD |
| | HCDR2 | | |
| 22 | 16278-A8.2- | artificial | AGNFGTSYISYWAY |
| | HCDR3 | | |
| 23 | 16278-A8.2- | artificial | GSSTGAVTSGNYPN |
| | LCDR1 | | |
| 24 | 16278-A8.2- | artificial | GTKFLAP |
| | LCDR2 | | |
| 25 | 16278-A8.2- | artificial | ALWYSNRWV |
| | LCDR3 | | |
| 26 | 16278-A8.2- | artificial | EVQLVESGGGLVQPGGSLKLSCAASGFTFNKYAINWVRQAPGKGLEWVARIRSKYNNY |
| | VH | | ATYYADAVKDRFTISRDDSKNTAYLQMNNLKTEDTAVYYCARAGNFGTSYISYWAYWG |
| | | | QGTLVTVSS |
| 27 | 16278-A8.2- | artificial | QTVVTQEPSLTVSPGGTVTLTCGSSTGAVTSGNYPNWVQKKPGQAPRGLIGGTKFLAP |
| | L | | GTPARFSGSLLGGKAALTLSGVQPEDEAEYYCALWYSNRWVFGSGTKLTVL |
| 28 | 16278-A8.4- | artificial | KYAIN |
| | HCDR1 | | |
| 29 | 16278-A8.4- | artificial | RIRSKYNNYATYYAEAVKD |
| | HCDR2 | | |
| 30 | 16278-A8.4- | artificial | AGNFGTSYISYWAY |
| | HCDR3 | | |
| 31 | 16278-A8.4 | artificial | GSSTGAVTSGNYPN |
| | -LCDR1 | | |
| 32 | 16278-A8.4 | artificial | GTKFLAP |
| | -LCDR2 | | |
| 33 | 16278-A8.4 | artificial | ALWYSNRWV |
| | -LCDR3 | | |
| 34 | 16278-A8.4 | artificial | EVQLVESGGGLVQPGGSLKLSCAASGFTFNKYAINWVRQAPGKGLEWVARIRSKYNNY |
| | -VH | | ATYYAEAVKDRFTISRDDSKNTAYLQMNNLKTEDTAVYYCARAGNFGTSYISYWAYWG |
| | | | QGTLVTVSS |
| 35 | 16278-A8.4 | artificial | QTVVTQEPSLTVSPGGTVTLTCGSSTGAVTSGNYPNWVQKKPGQAPRGLIGGTKFLAP |
| | -VL | | GTPARFSGSLLGGKAALTLSGVQPEDEAEYYCALWYSNRWVFGSGTKLTVL |
| 36 | 16281-D5.1 | artificial | KYAIN |
| | -HCDR1 | | |
| 37 | 16281-D5.1 | artificial | RIRSKYNNYATYYADAVKD |
| | -HCDR2 | | |
| 38 | 16281-D5.1 | artificial | AGNFGSSYISYFAY |
| | -HCDR3 | | |
| 39 | 16281-D5.1 | artificial | GSSTGAVTSGNYPN |
| | -LCDR1 | | |
| 40 | 16281-D5.1 | artificial | GTKFLAP |
| | -LCDR2 | | |
| 41 | 16281-D5.1 | artificial | ALWYSNRWV |
| | -LCDR3 | | |
| 42 | 16281-D5.1 | artificial | EVQLVESGGGLVQPGGSLKLSCAASGFTFNKYAINWVRQAPGKGLEWVARIRSKYNNY |
| | -VH | | ATYYADAVKDRFTISRDDSKNTAYLQMNNLKTEDTAVYYCVRAGNFGSSYISYFAYWG |
| | | | QGTLVTVSS |
| 43 | 16281-D5.1 | artificial | QTVVTQEPSLTVSPGGTVTLTCGSSTGAVTSGNYPNWVQKKPGQAPRGLIGGTKFLAP |
| | -VL | | GTPARFSGSLLGGKAALTLSGVQPEDEAEYYCALWYSNRWVFGSGTKLTVL |
| 44 | 16281-D5.3 | artificial | KYAIN |
| | -HCDR1 | | |
| 45 | 16281-D5.3 | artificial | RIRSKYNNYATYYAEAVKD |
| | -HCDR2 | | |
| 46 | 16281-D5.3 | artificial | AGNFGSSYISYFAY |
| | -HCDR3 | | |
| 47 | 16281-D5.3 | artificial | GSSTGAVTSGNYPN |
| | -LCDR1 | | |
| 48 | 16281-D5.3 | artificial | GTKFLAP |
| | -LCDR2 | | |
| 49 | 16281-D5.3 | artificial | ALWYSNRWV |
| | -LCDR3 | | |
| 50 | 16281-D5.3 | artificial | EVQLVESGGGLVQPGGSLKLSCAASGFTFNKYAINWVRQAPGKGLEWVARIRSKYNNY |
| | -VH | | ATYYAEAVKDRFTISRDDSKNTAYLQMNNLKTEDTAVYYCVRAGNFGSSYISYFAYWG |
| | | | QGTLVTVSS |
| 51 | 16281-D5.3 | artificial | QTVVTQEPSLTVSPGGTVTLTCGSSTGAVTSGNYPNWVQKKPGQAPRGLIGGTKFLAP |
| | -VL | | GTPARFSGSLLGGKAALTLSGVQPEDEAEYYCALWYSNRWVFGSGTKLTVL |
| 52 | 16281-D5.4 | artificial | KYAIN |
| | -HCDR1 | | |
| 53 | 16281-D5.4 | artificial | RIRSKYNNYATYYAEAVKD |
| | -HCDR2 | | |
| 54 | 16281-D5.4 | artificial | AGNFGTSYISYFAY |
| | -HCDR3 | | |
| 55 | 16281-D5.4 | artificial | GSSTGAVTSGNYPN |
| | -LCDR1 | | |
| 56 | 16281-D5.4 | artificial | GTKFLAP |
| | -LCDR2 | | |
| 57 | 16281-D5.4 | artificial | ALWYSNRWV |
| | -LCDR3 | | |
| 58 | 16281-D5.4 | artificial | EVQLVESGGGLVQPGGSLKLSCAASGFTFNKYAINWVRQAPGKGLEWVARIRSKYNNY |
| | -VH | | ATYYAEAVKDRFTISRDDSKNTAYLQMNNLKTEDTAVYYCVRAGNFGTSYISYFAYWG |
| | | | QGTLVTVSS |
| 59 | 16281-D5.4 | artificial | QTVVTQEPSLTVSPGGTVTLTCGSSTGAVTSGNYPNWVQKKPGQAPRGLIGGTKFLAP |
| | -VL | | GTPARFSGSLLGGKAALTLSGVQPEDEAEYYCALWYSNRWVFGSGTKLTVL |
| 60 | 16334-G10.4 | artificial | KYAMN |
| | -HCDR1 | | |
| 61 | 16334-G10.4 | artificial | RIRSKYNNYATYYAEAVKD |
| | -HCDR2 | | |
| 62 | 16334-G10.4 | artificial | AENIGTSYISYWAY |
| | -HCDR3 | | |
| 63 | 16334-G10.4 | artificial | GSSTGAVTSGNYPN |
| | -LCDR1 | | |
| 64 | 16334-G10.4 | artificial | GTKFLAP |
| | -LCDR2 | | |
| 65 | 16334-G10.4 | artificial | VLWYSNRWV |
| | -LCDR3 | | |
| 66 | 16334-G10.4 | artificial | EVQLVESGGGLVQPGGSLKLSCAASGFTFSKYAMNWVREAPGKGLEWVARIRSKYNNY |
| | -VH | | ATYYAEAVKDRFTISRDDSKNTVYLQMNNLKTEDTAVYYCVRAENIGTSYISYWAYWG |
| | | | QGTLVTVSS |
| 67 | 16334-G10.4 | artificial | QTVVTQEPSLTVSPGGTVTMTCGSSTGAVTSGNYPNWVQKKPGQAPRGLIGGTKFLAP |
| | -VL | | GTPARFSGSLEGGKAALTLSGVQPEDEAEYYCVLWYSNRWVFGGGTKLTVL |
| 68 | 16335-B1.5 | artificial | KYAMN |
| | -HCDR1 | | |
| 69 | 16335-B1.5 | artificial | RIRSKYNNYATYYAEAVKG |
| | -HCDR2 | | |
| 70 | 16335-B1.5 | artificial | AGNFGSSYISYWAY |
| | -HCDR3 | | |
| 71 | 16335-B1.5 | artificial | GSSTGAVTSGNYPN |
| | -LCDR1 | | |
| 72 | 16335-B1.5 | artificial | GTKFLAP |
| | -LCDR2 | | |
| 73 | 16335-B1.5 | artificial | VLWYSNRWV |
| | -LCDR3 | | |
| 74 | 16335-B1.5 | artificial | EVQLVESGGGLVQPGGSLKLSCAASGFTFSKYAMNWVRQAPGKGMEWVARIRSKYNNY |
| | -VH | | ATYYAEAVKGRFTISRDDSKNTVYLQMNNLKTEDTAVYYCVRAGNFGSSYISYWAYWG |
| | | | QGTLVTVSS |
| 75 | 16335-B1.5 | artificial | QTVVTQEPSLTVSPGGTVTLTCGSSTGAVTSGNYPNWVQKKPGQAPRGLIGGTKFLAP |
| | -VL | | GTPARFSGSLSGGKAALTLSGVQPEDEAEYYCVLWYSNRWVFGGGTKLTVL |
| 76 | 16335-B1.9 | artificial | KYAMN |
| | -HCDR1 | | |
| 77 | 16335-B1.9 | artificial | RIRSKYNNYATYYADAVKG |
| | -HCDR2 | | |
| 78 | 16335-B1.9 | artificial | AGNFGTSYISYFAY |
| | -HCDR3 | | |
| 79 | 16335-B1.9 | artificial | GSSTGAVTSGNYPN |
| | -LCDR1 | | |
| 80 | 16335-B1.9 | artificial | GTKFLAP |
| | -LCDR2 | | |
| 81 | 16335-B1.9 | artificial | VLYYSNRWV |
| | -LCDR3 | | |
| 82 | 16335-B1.9 | artificial | EVQLVESGGGLVQPGGSLKLSCAASGFTFSKYAMNWVRQAPGKGMEWVARIRSKYNNY |
| | -VH | | ATYYADAVKGRFTISRDDSKNTVYLQMNNLKTEDTAVYYCVRAGNFGTSYISYFAYWG |
| | | | QGTLVTVSS |
| 83 | 16335-B1.9 | artificial | QTVVTQEPSLTVSPGGTVTLTCGSSTGAVTSGNYPNWVQKKPGQAPRGLIGGTKFLAP |
| | -VL | | GTPARFSGSLSGGKAALTLSGVQPEDEAEYYCVLYYSNRWVFGGGTKLTVL |
| 84 | 16335-C3.4 | artificial | KYAIN |
| | -HCDR1 | | |
| 85 | 16335-C3.4 | artificial | RIRSKYNNYATYYADAVKD |
| | -HCDR2 | | |
| 86 | 16335-C3.4 | artificial | AENIGTSYISYWAY |
| | -HCDR3 | | |
| 87 | 16335-C3.4 | artificial | GSSTGAVTSGNYPN |
| | -LCDR1 | | |
| 88 | 16335-C3.4 | artificial | GTKFLAP |
| | -LCDR2 | | |
| 89 | 16335-C3.4 | artificial | VLWYSNRWV |
| | -LCDR3 | | |
| 90 | 16335-C3.4 | artificial | EVQLVESGGGLVQPGGSLKLSCAASGFTFNKYAINWVRQAPGKGLEWVARIRSKYNNY |
| | -VH | | ATYYADAVKDRFTISRDDSKNTVYLQMNNLKTEDTAVYYCARAENIGTSYISYWAYWG |
| | | | QGTLVTVSS |
| 91 | 16335-C3.4 | artificial | QTVVTQEPSLTVSPGGTVTITCGSSTGAVTSGNYPNWVQKKPGQAPRGLIGGTKFLAP |
| | -VL | | GTPARFSGSLSGGKAALTLSGVQPEDEAEYYCVLWYSNRWVFGSGTKLTVL |
| 92 | 16335-C3.5 | artificial | KYAIN |
| | -HCDR1 | | |
| 93 | 16335-C3.5 | artificial | RIRSKYNNYATYYAEAVKD |
| | -HCDR2 | | |
| 94 | 16335-C3.5 | artificial | AGNFGSSYISYWAY |
| | -HCDR3 | | |
| 95 | 16335-C3.5 | artificial | GSSTGAVTSGNYPN |
| | -LCDR1 | | |
| 96 | 16335-C3.5 | artificial | GTKFLAP |
| | -LCDR2 | | |
| 97 | 16335-C3.5 | artificial | VLYYSNRWV |
| | -LCDR3 | | |
| 98 | 16335-C3.5 | artificial | EVQLVESGGGLVQPGGSLKLSCAASGFTENKYAINWVRQAPGKGLEWVARIRSKYNNY |
| | -VH | | ATYYAEAVKDRFTISRDDSKNTVYLQMNNLKTEDTAVYYCARAGNFGSSYISYWAYWG |
| | | | QGTLVTVSS |
| 99 | 16335-C3.5 | artificial | QTVVTQEPSLTVSPGGTVTITCGSSTGAVTSGNYPNWVQKKPGQAPRGLIGGTKFLAP |
| | -VL | | GTPARFSGSLSGGKAALTLSGVQPEDEAEYYCVLYYSNRWVFGSGTKLTVL |
| 100 | 16335-G6.3 | artificial | EVQLVESGGGLVQPGGSLKLSCAASGFTFNKYAMNWVRQAPGKGLEWVARIRSKYNNY |
| | -VH | | ATYYAEAVKGRFTISRDDSKNTVYLQMNNLKTEDTAVYYCVRAGNFGSSYISYWAYWG |
| | | | QGTLVTVSS |
| 101 | 16335-G6.3 | artificial | QTVVTQEPSLTVSPGGTVTITCGSSTGAVTSGNYPNWVQQKPGQAPRGLIGGTKFLAP |
| | -VL | | GTPARFSGSLSGGKAALTLSGVQPEDEAEYYCVLWYSNRWVFGSGTKLTVL |
| 102 | 16335-G6.4 | artificial | KYAMN |
| | -HCDR1 | | |
| 103 | 16335-G6.4 | artificial | RIRSKYNNYATYYADAVKG |
| | -HCDR2 | | |
| 104 | 16335-G6.4 | artificial | NENIGSSYISYWAY |
| | -HCDR3 | | |
| 105 | 16335-G6.4 | artificial | GSSTGAVTSGNYPN |
| | -LCDR1 | | |
| 106 | 16335-G6.4 | artificial | GTKFLAP |
| | -LCDR2 | | |
| 107 | 16335-G6.4 | artificial | VLWYSNRWV |
| | -LCDR3 | | |
| 108 | 16335-G6.4 | artificial | EVQLVESGGGLVQPGGSLKLSCAASGFTFNKYAMNWVRQAPGKGLEWVARIRSKYNNY |
| | -VH | | ATYYADAVKGRFTISRDDSKNTVYLQMNNLKTEDTAVYYCVRNENIGSSYISYWAYWG |
| | | | QGTLVTVSS |
| 109 | 16335-G6.4 | artificial | QTVVTQEPSLTVSPGGTVTITCGSSTGAVTSGNYPNWVQQKPGQAPRGLIGGTKFLAP |
| | -VL | | GTPARFSGSLSGGKAALTLSGVQPEDEAEYYCVLWYSNRWVFGSGTKLTVL |
| 110 | 16356-H10.3 | artificial | KYAMN |
| | -HCDR1 | | |
| 111 | 16356-H10.3 | artificial | RIRSKYNNYATYYAEAVKD |
| | -HCDR2 | | |
| 112 | 16356-H10.3 | artificial | AGNFGTSYISYWAY |
| | -HCDR3 | | |
| 113 | 16356-H10.3 | artificial | GSSTGAVTSGNYPN |
| | -LCDR1 | | |
| 114 | 16356-H10.3 | artificial | GTKFLAP |
| | -LCDR2 | | |
| 115 | 16356-H10.3 | artificial | VLWYSNRWV |
| | -LCDR3 | | |
| 116 | 16356-H10.3 | artificial | EVQLVESGGGLVQPGGSLKLSCAASGFTFNKYAMNWVRQAPGKGMEWVARIRSKYNNY |
| | -VH | | ATYYAEAVKDRFTISRDDSKNTLYLQMNNLKTEDTAVYYCVRAGNFGTSYISYWAYWG |
| | | | QGTLVTVSS |
| 117 | 16356-H10.3 | artificial | QTVVTQEPSLTVSPGGTVTITCGSSTGAVTSGNYPNWIQKKPGQAPRGLIGGTKFLAP |
| | -VL | | GTPARFSGSLEGGKAALTLSGVQPEDEAEYYCVLWYSNRWVFGSGTKLTVL |
| 118 | 2B2_Comp1- | artificial | KYAIN |
| | HCDR1 | | |
| 119 | 2B2_Comp1- | artificial | RIRSKYNNYATYYADQVKD |
| | HCDR2 | | |
| 120 | 2B2_Comp1- | artificial | HANFGNSYISYWAY |
| | HCDR3 | | |
| 121 | 2B2_Comp1- | artificial | ASSTGAVTSGNYPN |
| | LCDR1 | | |
| 122 | 2B2_Comp1- | artificial | GTKFLVP |
| | LCDR2 | | |
| 123 | 2B2_Comp1- | artificial | TLWYSNRWV |
| | LCDR3 | | |
| 124 | 2B2_Comp1- | artificial | EVQLVESGGGLVQPGGSLKLSCAASGFTFNKYAINWVRQAPGKGLEWVARIRSKYNNY |
| | VH | | ATYYADQVKDRFTISRDDSKNTAYLQMNNLKTEDTAVYYCVRHANFGNSYISYWAYWG |
| | | | QGTLVTVSS |
| 125 | 2B2_Comp1- | artificial | QTVVTQEPSLTVSPGGTVTLTCASSTGAVTSGNYPNWVQQKPGQAPRGLIGGTKFLVP |
| | VL | | GTPARFSGSLLGGKAALTLSGVQPEDEAEYYCTLWYSNRWVFGGGTKLTVL |
| 126 | 2B2_Comp1_ | artificial | KYAIN |
| | I2E-HCDR1 | | |
| 127 | 2B2_Comp1_ | artificial | RIRSKYNNYATYYADAVKD |
| | I2E-HCDR2 | | |
| 128 | 2B2_Comp1_ | artificial | AANFGSSYISYWAY |
| | I2E-HCDR3 | | |
| 129 | 2B2_Comp1_ | artificial | ASSTGAVTSGNYPN |
| | I2E-LCDR1 | | |
| 130 | 2B2_Comp1_ | artificial | GTKFLVP |
| | I2E-LCDR2 | | |
| 131 | 2B2_Comp1_ | artificial | TLWYSNRWV |
| | I2E-LCDR3 | | |
| 132 | 2B2_Comp1_ | artificial | EVQLVESGGGLVQPGGSLKLSCAASGFTFNKYAINWVRQAPGKGLEWVARIRSKYNNY |
| | I2E-VH | | ATYYADAVKDRFTISRDDSKNTVYLQMNNLKTEDTAVYYCARAANFGSSYISYWAYWG |
| | | | QGTLVTVSS |
| 133 | 2B2_Comp1_ | artificial | QTVVTQEPSLTVSPGGTVTITCASSTGAVTSGNYPNWVQKKPGQAPRGLIGGTKFLVP |
| | I2E-VL | | GTPARFSGSLSGGKAALTLSGVQPEDEAEYYCTLWYSNRWVFGSGTKLTVL |
| 134 | 2B2_Comp1_ | artificial | KYAMN |
| | I2K-HCDR1 | | |
| 135 | 2B2_Comp1_ | artificial | RIRSKYNNYATYYAEAVKG |
| | I2K-HCDR2 | | |
| 136 | 2B2_Comp1_ | artificial | NENIGTSYISYWAY |
| | I2K-HCDR3 | | |
| 137 | 2B2_Comp1_ | artificial | ASSTGAVTSGNYPN |
| | I2K-LCDR1 | | |
| 138 | 2B2_Comp1_ | artificial | GTKFLVP |
| | I2K-LCDR2 | | |
| 139 | 2B2_Comp1_ | artificial | TLWYSNRWV |
| | I2K-LCDR3 | | |
| 140 | 2B2_Comp1_ | artificial | EVQLVESGGGLVQPGGSLKLSCAASGFTFNKYAMNWVRQAPGKGLEWVARIRSKYNNY |
| | 2K-VH | | ATYYAEAVKGRFTISRDDSKNTVYLQMNNLKTEDTAVYYCVRNENIGTSYISYWAYWG |
| | | | QGTLVTVSS |
| 141 | 2B2_Comp1_ | artificial | QTVVTQEPSLTVSPGGTVTITCASSTGAVTSGNYPNWVQQKPGQAPRGLIGGTKFLVP |
| | I2K-VL | | GTPARFSGSLSGGKAALTLSGVQPEDEAEYYCTLWYSNRWVFGSGTKLTVL |
| 142 | 2B2_Comp1_ | artificial | KYAIN |
| | I2L-HCDR1 | | |
| 143 | 2B2_Comp1_ | artificial | RIRSKYNNYATYYADAVKD |
| | I2L-HCDR2 | | |
| 144 | 2B2_Comp1_ | artificial | AANFGSSYISYFAY |
| | I2L-HCDR3 | | |
| 145 | 2B2_Comp1_ | artificial | ASSTGAVTSGNYPN |
| | I2L-LCDR1 | | |
| 146 | 2B2_Comp1_ | artificial | GTKFLVP |
| | I2L-LCDR2 | | |
| 147 | 2B2_Comp1_ | artificial | TLYYSNRWV |
| | I2L-LCDR3 | | |
| 148 | 2B2_Comp1_ | artificial | EVQLVESGGGLVQPGGSLKLSCAASGFTENKYAINWVRQAPGKGMEWVARIRSKYNNY |
| | I2L-VH | | ATYYADAVKDRFTISRDDSKNTLYLQMNNLKTEDTAVYYCVRAANFGSSYISYFAYWG |
| | | | QGTLVTVSS |
| 149 | 2B2_Comp1_ | artificial | QTVVTQEPSLTVSPGGTVTITCASSTGAVTSGNYPNWIQKKPGQAPRGLIGGTKFLVP |
| | I2L-VL | | GTPARFSGSLEGGKAALTLSGVQPEDEAEYYCTLYYSNRWVFGSGTKLTVL |
| 150 | 2B2_Comp1_ | artificial | KYAIN |
| | I2M-HCDR1 | | |
| 151 | 2B2_Comp1_ | artificial | RIRSKYNNYATYYADAVKD |
| | I2M-HCDR2 | | |
| 152 | 2B2_Comp1_ | artificial | AANFGTSYISYWAY |
| | I2M-HCDR3 | | |
| 153 | 2B2_Comp1_ | artificial | ASSTGAVTSGNYPN |
| | I2M-LCDR1 | | |
| 154 | 2B2_Comp1_ | artificial | GTKFLVP |
| | I2M-LCDR2 | | |
| 155 | 2B2_Comp1_ | artificial | TLWYSNRWV |
| | I2M-LCDR3 | | |
| 156 | 2B2_Comp1_ | artificial | EVQLVESGGGLVQPGGSLKLSCAASGFTFNKYAINWVRQAPGKGMEWVARIRSKYNNY |
| | I2M-VH | | ATYYADAVKDRFTISRDDSKNTLYLQMNNLKTEDTAVYYCVRAANFGTSYISYWAYWG |
| | | | QGTLVTVSS |
| 157 | 2B2_Comp1_ | artificial | QTVVTQEPSLTVSPGGTVTITCASSTGAVTSGNYPNWVQKKPGQAPRGLIGGTKFLVP |
| | I2M-VL | | GTPARFSGSLSGGKAALTLSGVQPEDEAEYYCTLWYSNRWVFGSGTKLTVL |
| 158 | 2B2_Comp1_ | artificial | KYAIN |
| | I2M2-HCDR1 | | |
| 159 | 2B2_Comp1_ | artificial | RIRSKYNNYATYYADAVKD |
| | I2M2-HCDR2 | | |
| 160 | 2B2_Comp1_ | artificial | NANFGTSYISYFAY |
| | I2M2-HCDR3 | | |
| 161 | 2B2_Comp1_ | artificial | ASSTGAVTSGNYPN |
| | I2M2-LCDR1 | | |
| 162 | 2B2_Comp1_ | artificial | GTKFLVP |
| | I2M2-LCDR2 | | |
| 163 | 2B2_Comp1_ | artificial | TLWYSNRWV |
| | I2M2-LCDR3 | | |
| 164 | 2B2_Comp1_ | artificial | EVQLVESGGGLVQPGGSLKLSCAASGFTFNKYAINWVREAPGKGLEWVARIRSKYNNY |
| | I2M2-VH | | ATYYADAVKDRFTISRDDSKNTAYLQMNNLKTEDTAVYYCVRNANFGTSYISYFAYWG |
| | | | QGTLVTVSS |
| 165 | 2B2_Comp1_ | artificial | QTVVTQEPSLTVSPGGTVTLTCASSTGAVTSGNYPNWVQKKPGQAPRGLIGGTKFLVP |
| | I2M2-VL | | GTPARFSGSLLGGKAALTLSGVQPEDEAEYYCTLWYSNRWVFGSGTKLTVL |
| 166 | A2J-HCDR1 | artificial | VYAMN |
| 167 | A2J-HCDR2 | artificial | RIRSKYNNYATYYADSVKK |
| 168 | A2J-HCDR3 | artificial | HGNFGNSYLSWWAY |
| 169 | A2J-LCDR1 | artificial | RSSTGAVTSGYYPN |
| 170 | A2J-LCDR2 | artificial | ATDMRPS |
| 171 | A2J-LCDR3 | artificial | ALWYSNRWV |
| 172 | A2J-VH | artificial | EVQLVESGGGLVQPGGSLKLSCAASGFTFNVYAMNWVRQAPGKGLEWVARIRSKYNNY |
| | | | ATYYADSVKKRFTISRDDSKNTAYLQMNNLKTEDTAVYYCVRHGNFGNSYLSWWAYWG |
| | | | QGTLVTVSS |
| 173 | A2J-VL | artificial | QTVVTQEPSLTVSPGGTVTLTCRSSTGAVTSGYYPNWVQQKPGQAPRGLIGATDMRPS |
| | | | GTPARFSGSLLGGKAALTLSGVQPEDEAEYYCALWYSNRWVFGGGTKLTVL |
| 174 | A2J_HC_A89I | artificial | EVQLVESGGGLVQPGGSLKLSCAASGFTFNVYAMNWVRQAPGKGLEWVARIRSKYNNY |
| | -VH | | ATYYADSVKKRFTISRDDSKNTIYLQMNNLKTEDTAVYYCVRHGNFGNSYLSWWAYWG |
| | | | QGTLVTVSS |
| 175 | A2J_HC_A89I | artificial | QTVVTQEPSLTVSPGGTVTLTCRSSTGAVTSGYYPNWVQQKPGQAPRGLIGATDMRPS |
| | -VL | | GTPARFSGSLLGGKAALTLSGVQPEDEAEYYCALWYSNRWVFGGGTKLTVL |
| 176 | A2J_HC_A89L | artificial | EVQLVESGGGLVQPGGSLKLSCAASGFTFNVYAMNWVRQAPGKGLEWVARIRSKYNNY |
| | -VH | | ATYYADSVKKRFTISRDDSKNTLYLQMNNLKTEDTAVYYCVRHGNFGNSYLSWWAYWG |
| | | | QGTLVTVSS |
| 177 | A2J_HC_A89L | artificial | QTVVTQEPSLTVSPGGTVTLTCRSSTGAVTSGYYPNWVQQKPGQAPRGLIGATDMRPS |
| | -VL | | GTPARFSGSLLGGKAALTLSGVQPEDEAEYYCALWYSNRWVFGGGTKLTVL |
| 178 | A2J_HC_A89T | artificial | EVQLVESGGGLVQPGGSLKLSCAASGFTFNVYAMNWVRQAPGKGLEWVARIRSKYNNY |
| | -VH | | ATYYADSVKKRFTISRDDSKNTTYLQMNNLKTEDTAVYYCVRHGNFGNSYLSWWAYWG |
| | | | QGTLVTVSS |
| 179 | A2J_HC_A89T | artificial | QTVVTQEPSLTVSPGGTVTLTCRSSTGAVTSGYYPNWVQQKPGQAPRGLIGATDMRPS |
| | -VL | | GTPARFSGSLLGGKAALTLSGVQPEDEAEYYCALWYSNRWVFGGGTKLTVL |
| 180 | A2J_HC_A89V | artificial | EVQLVESGGGLVQPGGSLKLSCAASGFTFNVYAMNWVRQAPGKGLEWVARIRSKYNNY |
| | -VH | | ATYYADSVKKRFTISRDDSKNTVYLQMNNLKTEDTAVYYCVRHGNFGNSYLSWWAYWG |
| | | | QGTLVTVSS |
| 181 | A2J_HC_A89V | artificial | QTVVTQEPSLTVSPGGTVTLTCRSSTGAVTSGYYPNWVQQKPGQAPRGLIGATDMRPS |
| | -VL | | GTPARFSGSLLGGKAALTLSGVQPEDEAEYYCALWYSNRWVFGGGTKLTVL |
| 182 | A2J_HC_L52M | artificial | EVQLVESGGGLVQPGGSLKLSCAASGFTFNVYAMNWVRQAPGKGMEWVARIRSKYNNY |
| | -VH | | ATYYADSVKKRFTISRDDSKNTAYLQMNNLKTEDTAVYYCVRHGNFGNSYLSWWAYWG |
| | | | QGTLVTVSS |
| 183 | A2J_HC_L52M | artificial | QTVVTQEPSLTVSPGGTVTLTCRSSTGAVTSGYYPNWVQQKPGQAPRGLIGATDMRPS |
| | -VL | | GTPARFSGSLLGGKAALTLSGVQPEDEAEYYCALWYSNRWVFGGGTKLTVL |
| 184 | A2J_HC_L52M_ | artificial | EVQLVESGGGLVQPGGSLKLSCAASGFTFNVYAMNWVRQAPGKGMEWVARIRSKYNNY |
| | LC_L21I_Q46K_ | | ATYYADSVKKRFTISRDDSKNTAYLQMNNLKTEDTAVYYCVRHGNFGNSYLSWWAYWG |
| | G141S- | | QGTLVTVSS |
| | VH | | |
| 185 | A2J_HC_L52M_ | artificial | QTVVTQEPSLTVSPGGTVTITCRSSTGAVTSGYYPNWVQKKPGQAPRGLIGATDMRPS |
| | LC_L21I_Q46K_ | | GTPARFSGSLLGGKAALTLSGVQPEDEAEYYCALWYSNRWVFGSGTKLTVL |
| | G141S- | | |
| | VL | | |
| 186 | A2J_HC_L52M_ | artificial | EVQLVESGGGLVQPGGSLKLSCAASGFTFNVYAMNWVRQAPGKGMEWVARIRSKYNNY |
| | LC_Q46K- | | ATYYADSVKKRFTISRDDSKNTAYLQMNNLKTEDTAVYYCVRHGNFGNSYLSWWAYWG |
| | VH | | QGTLVTVSS |
| 187 | A2J_HC_L52M_ | artificial | QTVVTQEPSLTVSPGGTVTLTCRSSTGAVTSGYYPNWVQKKPGQAPRGLIGATDMRPS |
| | LC_Q46K- | | GTPARFSGSLLGGKAALTLSGVQPEDEAEYYCALWYSNRWVFGGGTKLTVL |
| | VL | | |
| 188 | A2J_HC_L52M_ | artificial | EVQLVESGGGLVQPGGSLKLSCAASGFTFNVYAMNWVRQAPGKGMEWVARIRSKYNNY |
| | LC_Q46K_ | | ATYYADSVKKRFTISRDDSKNTAYLQMNNLKTEDTAVYYCVRHGNFGNSYLSWWAYWG |
| | G141S-VH | | QGTLVTVSS |
| 189 | A2J_HC_L52M_ | artificial | QTVVTQEPSLTVSPGGTVTLTCRSSTGAVTSGYYPNWVQKKPGQAPRGLIGATDMRPS |
| | LC_Q46K_ | | GTPARFSGSLLGGKAALTLSGVQPEDEAEYYCALWYSNRWVFGSGTKLTVL |
| | G141S-VL | | |
| 190 | A2J_HC_L52V | artificial | EVQLVESGGGLVQPGGSLKLSCAASGFTFNVYAMNWVRQAPGKGVEWVARIRSKYNNY |
| | -VH | | ATYYADSVKKRFTISRDDSKNTAYLQMNNLKTEDTAVYYCVRHGNFGNSYLSWWAYWG |
| | | | QGTLVTVSS |
| 191 | A2J_HC_L52V | artificial | QTVVTQEPSLTVSPGGTVTLTCRSSTGAVTSGYYPNWVQQKPGQAPRGLIGATDMRPS |
| | -VL | | GTPARFSGSLLGGKAALTLSGVQPEDEAEYYCALWYSNRWVFGGGTKLTVL |
| 192 | A2J_HC_L52V_ | artificial | EVQLVESGGGLVQPGGSLKLSCAASGFTFNVYAMNWVRQAPGKGVEWVARIRSKYNNY |
| | LC_V44F- | | ATYYADSVKKRFTISRDDSKNTAYLQMNNLKTEDTAVYYCVRHGNFGNSYLSWWAYWG |
| | VH | | QGTLVTVSS |
| 193 | A2J_HC_L52V_ | artificial | QTVVTQEPSLTVSPGGTVTLTCRSSTGAVTSGYYPNWFQQKPGQAPRGLIGATDMRPS |
| | LC_V44F- | | GTPARFSGSLLGGKAALTLSGVQPEDEAEYYCALWYSNRWVFGGGTKLTVL |
| | VL | | |
| 194 | A2J_HC_L52V_ | artificial | EVQLVESGGGLVQPGGSLKLSCAASGFTFNVYAMNWVRQAPGKGVEWVARIRSKYNNY |
| | LC_V44Y- | | ATYYADSVKKRFTISRDDSKNTAYLQMNNLKTEDTAVYYCVRHGNFGNSYLSWWAYWG |
| | VH | | QGTLVTVSS |
| 195 | A2J_HC_L52V_ | artificial | QTVVTQEPSLTVSPGGTVTLTCRSSTGAVTSGYYPNWYQQKPGQAPRGLIGATDMRPS |
| | LC_V44Y- | | GTPARFSGSLLGGKAALTLSGVQPEDEAEYYCALWYSNRWVFGGGTKLTVL |
| | VL | | |
| 196 | A2J_HC_M41F_ | artificial | VYAFN |
| | A89V- | | |
| | HCDR1 | | |
| 197 | A2J_HC_M41F_ | artificial | RIRSKYNNYATYYADSVKK |
| | A89V-HCDR2 | | |
| 198 | A2J_HC_M41F_ | artificial | HGNFGNSYLSWWAY |
| | A89V-HCDR3 | | |
| 199 | A2J_HC_M41F_ | artificial | RSSTGAVTSGYYPN |
| | A89V- | | |
| | LCDR1 | | |
| 200 | A2J_HC_M41F | artificial | ATDMRPS |
| | A89V-LCDR2 | | |
| 201 | A2J_HC_M41F_ | artificial | ALWYSNRWV |
| | A89V-LCDR3 | | |
| 202 | A2J_HC_M41F_ | artificial | EVQLVESGGGLVQPGGSLKLSCAASGFTFNVYAFNWVRQAPGKGLEWVARIRSKYNNY |
| | A89V-VH | | ATYYADSVKKRFTISRDDSKNTVYLQMNNLKTEDTAVYYCVRHGNFGNSYLSWWAYWG |
| | | | QGTLVTVSS |
| 203 | A2J_HC_M41F_ | artificial | QTVVTQEPSLTVSPGGTVTLTCRSSTGAVTSGYYPNWVQQKPGQAPRGLIGATDMRPS |
| | A89V-VL | | GTPARFSGSLLGGKAALTLSGVQPEDEAEYYCALWYSNRWVFGGGTKLTVL |
| 204 | A2J_HC_M41I | artificial | VYAIN |
| | -HCDR1 | | |
| 205 | A2J_HC_M41I | artificial | RIRSKYNNYATYYADSVKK |
| | -HCDR2 | | |
| 206 | A2J_HC_M41I | artificial | HGNFGNSYLSWWAY |
| | -HCDR3 | | |
| 207 | A2J_HC_M41I | artificial | RSSTGAVTSGYYPN |
| | -LCDR1 | | |
| 208 | A2J_HC_M41I | artificial | ATDMRPS |
| | -LCDR2 | | |
| 209 | A2J_HC_M41I | artificial | ALWYSNRWV |
| | -LCDR3 | | |
| 210 | A2J_HC_M41I | artificial | EVQLVESGGGLVQPGGSLKLSCAASGFTFNVYAINWVRQAPGKGLEWVARIRSKYNNY |
| | -VH | | ATYYADSVKKRFTISRDDSKNTAYLQMNNLKTEDTAVYYCVRHGNFGNSYLSWWAYWG |
| | | | QGTLVTVSS |
| 211 | A2J_HC_M41I | artificial | QTVVTQEPSLTVSPGGTVTLTCRSSTGAVTSGYYPNWVQQKPGQAPRGLIGATDMRPS |
| | -VL | | GTPARFSGSLLGGKAALTLSGVQPEDEAEYYCALWYSNRWVFGGGTKLTVL |
| 212 | A2J_HC_M41I_ | artificial | EVQLVESGGGLVQPGGSLKLSCAASGFTFNVYAINWVRQAPGKGLEWVARIRSKYNNY |
| | A89L-VH | | ATYYADSVKKRFTISRDDSKNTLYLQMNNLKTEDTAVYYCVRHGNFGNSYLSWWAYWG |
| | | | QGTLVTVSS |
| 213 | A2J_HC_M41I_ | artificial | QTVVTQEPSLTVSPGGTVTLTCRSSTGAVTSGYYPNWVQQKPGQAPRGLIGATDMRPS |
| | A89L-VL | | GTPARFSGSLLGGKAALTLSGVQPEDEAEYYCALWYSNRWVFGGGTKLTVL |
| 214 | A2J_HC_M41I_ | artificial | EVQLVESGGGLVQPGGSLKLSCAASGFTFNVYAINWVRQAPGKGLEWVARIRSKYNNY |
| | A89V-VH | | ATYYADSVKKRFTISRDDSKNTVYLQMNNLKTEDTAVYYCVRHGNFGNSYLSWWAYWG |
| | | | QGTLVTVSS |
| 215 | A2J_HC_M41I_ | artificial | QTVVTQEPSLTVSPGGTVTLTCRSSTGAVTSGYYPNWVQQKPGQAPRGLIGATDMRPS |
| | A89V-VL | | GTPARFSGSLLGGKAALTLSGVQPEDEAEYYCALWYSNRWVFGGGTKLTVL |
| 216 | A2J_HC_M41I_ | artificial | EVQLVESGGGLVQPGGSLKLSCAASGFTFNVYAINWVRQAPGKGLEWVARIRSKYNNY |
| | A89V_LC_L21I_ | | ATYYADSVKKRFTISRDDSKNTVYLQMNNLKTEDTAVYYCVRHGNFGNSYLSWWAYWG |
| | Q46K_ | | QGTLVTVSS |
| | G141S-VH | | |
| 217 | A2J_HC_M41I_ | artificial | QTVVTQEPSLTVSPGGTVTITCRSSTGAVTSGYYPNWVQKKPGQAPRGLIGATDMRPS |
| | A89V_LC_L21I_ | | GTPARFSGSLLGGKAALTLSGVQPEDEAEYYCALWYSNRWVFGSGTKLTVL |
| | Q46K_ | | |
| | G141S-VL | | |
| 218 | A2J_HC_M41I_ | artificial | EVQLVESGGGLVQPGGSLKLSCAASGFTFNVYAINWVRQAPGKGLEWVARIRSKYNNY |
| | A89V_LC_ | | ATYYADSVKKRFTISRDDSKNTVYLQMNNLKTEDTAVYYCVRHGNFGNSYLSWWAYWG |
| | Q46K-VH | | QGTLVTVSS |
| 219 | A2J_HC_M41I_ | artificial | QTVVTQEPSLTVSPGGTVTLTCRSSTGAVTSGYYPNWVQKKPGQAPRGLIGATDMRPS |
| | A89V_LC_ | | GTPARFSGSLLGGKAALTLSGVQPEDEAEYYCALWYSNRWVFGGGTKLTVL |
| | Q46K-VL | | |
| 220 | A2J_HC_M41I_ | artificial | EVQLVESGGGLVQPGGSLKLSCAASGFTFNVYAINWVRQAPGKGVEWVARIRSKYNNY |
| | L52V_A89V_ | | ATYYADSVKKRFTISRDDSKNTVYLQMNNLKTEDTAVYYCVRHGNFGNSYLSWWAYWG |
| | LC_L21I_ | | QGTLVTVSS |
| | Q46K_G141S_ | | |
| | V44F-VH | | |
| 221 | A2J_HC_M41I_ | artificial | QTVVTQEPSLTVSPGGTVTITCRSSTGAVTSGYYPNWFQKKPGQAPRGLIGATDMRPS |
| | L52V_A89V_ | | GTPARFSGSLLGGKAALTLSGVQPEDEAEYYCALWYSNRWVFGSGTKLTVL |
| | LC_L21I_ | | |
| | Q46K_G141S- | | |
| | V44F-VL | | |
| 222 | A2J_HC_M41I_ | artificial | EVQLVESGGGLVQPGGSLKLSCAASGFTFNVYAINWVRQAPGKGLEWVARIRSKYNNY |
| | LC_L21I_ | | ATYYADSVKKRFTISRDDSKNTAYLQMNNLKTEDTAVYYCVRHGNFGNSYLSWWAYWG |
| | Q46K_G141S- | | QGTLVTVSS |
| | VH | | |
| 223 | A2J_HC_M41I_ | artificial | QTVVTQEPSLTVSPGGTVTITCRSSTGAVTSGYYPNWVQKKPGQAPRGLIGATDMRPS |
| | LC_L21I_ | | GTPARFSGSLLGGKAALTLSGVQPEDEAEYYCALWYSNRWVFGSGTKLTVL |
| | Q46K_G141S- | | |
| | VL | | |
| 224 | A2J_HC_M41I_ | artificial | EVQLVESGGGLVQPGGSLKLSCAASGFTFNVYAINWVREAPGKGLEWVARIRSKYNNY |
| | Q46E_A89V_ | | ATYYADSVKKRFTISRDDSKNTVYLQMNNLKTEDTAVYYCVRHGNFGNSYLSWWAYWG |
| | LC_L21I_ | | QGTLVTVSS |
| | Q46K_G141S- | | |
| | VH | | |
| 225 | A2J_HC_M41I_ | artificial | QTVVTQEPSLTVSPGGTVTITCRSSTGAVTSGYYPNWVQKKPGQAPRGLIGATDMRPS |
| | Q46E_A89V_ | | GTPARFSGSLLGGKAALTLSGVQPEDEAEYYCALWYSNRWVFGSGTKLTVL |
| | LC_L21I_ | | |
| | Q46K_G141S- | | |
| | VL | | |
| 226 | A2J_HC_M41V | artificial | VYAVN |
| | -HCDR1 | | |
| 227 | A2J_HC_M41V | artificial | RIRSKYNNYATYYADSVKK |
| | -HCDR2 | | |
| 228 | A2J_HC_M41V | artificial | HGNFGNSYLSWWAY |
| | -HCDR3 | | |
| 229 | A2J_HC_M41V | artificial | RSSTGAVTSGYYPN |
| | -LCDR1 | | |
| 230 | A2J_HC_M41V | artificial | ATDMRPS |
| | -LCDR2 | | |
| 231 | A2J_HC_M41V | artificial | ALWYSNRWV |
| | -LCDR3 | | |
| 232 | A2J_HC_M41V | artificial | EVQLVESGGGLVQPGGSLKLSCAASGFTFNVYAVNWVRQAPGKGLEWVARIRSKYNNY |
| | -VH | | ATYYADSVKKRFTISRDDSKNTAYLQMNNLKTEDTAVYYCVRHGNFGNSYLSWWAYWG |
| | | | QGTLVTVSS |
| 233 | A2J_HC_M41V | artificial | QTVVTQEPSLTVSPGGTVTLTCRSSTGAVTSGYYPNWVQQKPGQAPRGLIGATDMRPS |
| | -VL | | GTPARFSGSLLGGKAALTLSGVQPEDEAEYYCALWYSNRWVFGGGTKLTVL |
| 234 | A2J_HC_Q46D | artificial | EVQLVESGGGLVQPGGSLKLSCAASGFTFNVYAMNWVRDAPGKGLEWVARIRSKYNNY |
| | -VH | | ATYYADSVKKRFTISRDDSKNTAYLQMNNLKTEDTAVYYCVRHGNFGNSYLSWWAYWG |
| | | | QGTLVTVSS |
| 235 | A2J_HC_Q46D | artificial | QTVVTQEPSLTVSPGGTVTLTCRSSTGAVTSGYYPNWVQQKPGQAPRGLIGATDMRPS |
| | -VL | | GTPARFSGSLLGGKAALTLSGVQPEDEAEYYCALWYSNRWVFGGGTKLTVL |
| 236 | A2J_HC_Q46D_ | artificial | EVQLVESGGGLVQPGGSLKLSCAASGFTFNVYAMNWVRDAPGKGLEWVARIRSKYNNY |
| | LC_L21I_ | | ATYYADSVKKRFTISRDDSKNTAYLQMNNLKTEDTAVYYCVRHGNFGNSYLSWWAYWG |
| | Q46K_G141S- | | QGTLVTVSS |
| | VH | | |
| 237 | A2J_HC_Q46D_ | artificial | QTVVTQEPSLTVSPGGTVTITCRSSTGAVTSGYYPNWVQKKPGQAPRGLIGATDMRPS |
| | LC_L21I_ | | GTPARFSGSLLGGKAALTLSGVQPEDEAEYYCALWYSNRWVFGSGTKLTVL |
| | Q46K_G141S- | | |
| | VL | | |
| 238 | A2J_HC_Q46D_ | artificial | EVQLVESGGGLVQPGGSLKLSCAASGFTFNVYAMNWVRDAPGKGLEWVARIRSKYNNY |
| | LC_L21I_ | | ATYYADSVKKRFTISRDDSKNTAYLQMNNLKTEDTAVYYCVRHGNFGNSYLSWWAYWG |
| | Q46R_G141S- | | QGTLVTVSS |
| | VH | | |
| 239 | A2J_HC_Q46D_ | artificial | QTVVTQEPSLTVSPGGTVTITCRSSTGAVTSGYYPNWVQRKPGQAPRGLIGATDMRPS |
| | LC_L21I_ | | GTPARFSGSLLGGKAALTLSGVQPEDEAEYYCALWYSNRWVFGSGTKLTVL |
| | Q46R_G141S- | | |
| | VL | | |
| 240 | A2J_HC_Q46D_ | artificial | EVQLVESGGGLVQPGGSLKLSCAASGFTFNVYAMNWVRDAPGKGLEWVARIRSKYNNY |
| | LC_Q46K- | | ATYYADSVKKRFTISRDDSKNTAYLQMNNLKTEDTAVYYCVRHGNFGNSYLSWWAYWG |
| | VH | | QGTLVTVSS |
| 241 | A2J_HC_Q46D_ | artificial | QTVVTQEPSLTVSPGGTVTLTCRSSTGAVTSGYYPNWVQKKPGQAPRGLIGATDMRPS |
| | LC_Q46K- | | GTPARFSGSLLGGKAALTLSGVQPEDEAEYYCALWYSNRWVFGGGTKLTVL |
| | VL | | |
| 242 | A2J_HC_Q46D_ | artificial | EVQLVESGGGLVQPGGSLKLSCAASGFTFNVYAMNWVRDAPGKGLEWVARIRSKYNNY |
| | LC_Q46K_ | | ATYYADSVKKRFTISRDDSKNTAYLQMNNLKTEDTAVYYCVRHGNFGNSYLSWWAYWG |
| | G141S-VH | | QGTLVTVSS |
| 243 | A2J_HC_Q46D_ | artificial | QTVVTQEPSLTVSPGGTVTLTCRSSTGAVTSGYYPNWVQKKPGQAPRGLIGATDMRPS |
| | LC_Q46K_ | | GTPARFSGSLLGGKAALTLSGVQPEDEAEYYCALWYSNRWVFGSGTKLTVL |
| | G141S-VL | | |
| 244 | A2J_HC_Q46D_ | artificial | EVQLVESGGGLVQPGGSLKLSCAASGFTFNVYAMNWVRDAPGKGLEWVARIRSKYNNY |
| | LC_Q46R- | | ATYYADSVKKRFTISRDDSKNTAYLQMNNLKTEDTAVYYCVRHGNFGNSYLSWWAYWG |
| | VH | | QGTLVTVSS |
| 245 | A2J_HC_Q46D_ | artificial | QTVVTQEPSLTVSPGGTVTLTCRSSTGAVTSGYYPNWVQRKPGQAPRGLIGATDMRPS |
| | LC_Q46R- | | GTPARFSGSLLGGKAALTLSGVQPEDEAEYYCALWYSNRWVFGGGTKLTVL |
| | VL | | |
| 246 | A2J_HC_Q46D_ | artificial | EVQLVESGGGLVQPGGSLKLSCAASGFTFNVYAMNWVRDAPGKGLEWVARIRSKYNNY |
| | LC_Q46R_ | | ATYYADSVKKRFTISRDDSKNTAYLQMNNLKTEDTAVYYCVRHGNFGNSYLSWWAYWG |
| | G141S-VH | | QGTLVTVSS |
| 247 | A2J_HC_Q46D_ | artificial | QTVVTQEPSLTVSPGGTVTLTCRSSTGAVTSGYYPNWVQRKPGQAPRGLIGATDMRPS |
| | LC_Q46R_ | | GTPARFSGSLLGGKAALTLSGVQPEDEAEYYCALWYSNRWVFGSGTKLTVL |
| | G141S-VL | | |
| 248 | A2J_HC_Q46E | artificial | EVQLVESGGGLVQPGGSLKLSCAASGFTFNVYAMNWVREAPGKGLEWVARIRSKYNNY |
| | -VH | | ATYYADSVKKRFTISRDDSKNTAYLQMNNLKTEDTAVYYCVRHGNFGNSYLSWWAYWG |
| | | | QGTLVTVSS |
| 249 | A2J_HC_Q46E | artificial | QTVVTQEPSLTVSPGGTVTLTCRSSTGAVTSGYYPNWVQQKPGQAPRGLIGATDMRPS |
| | -VL | | GTPARFSGSLLGGKAALTLSGVQPEDEAEYYCALWYSNRWVFGGGTKLTVL |
| 250 | A2J_HC_Q46E_ | artificial | EVQLVESGGGLVQPGGSLKLSCAASGFTFNVYAMNWVREAPGKGLEWVARIRSKYNNY |
| | LC_L21I_ | | ATYYADSVKKRFTISRDDSKNTAYLQMNNLKTEDTAVYYCVRHGNFGNSYLSWWAYWG |
| | Q46K_G141S- | | QGTLVTVSS |
| | VH | | |
| 251 | A2J_HC_Q46E_ | artificial | QTVVTQEPSLTVSPGGTVTITCRSSTGAVTSGYYPNWVQKKPGQAPRGLIGATDMRPS |
| | LC_L21I_ | | GTPARFSGSLLGGKAALTLSGVQPEDEAEYYCALWYSNRWVFGSGTKLTVL |
| | Q46K_G141S | | |
| | VL | | |
| 252 | A2J_HC_Q46E_ | artificial | EVQLVESGGGLVQPGGSLKLSCAASGFTFNVYAMNWVREAPGKGLEWVARIRSKYNNY |
| | LC_L21I_ | | ATYYADSVKKRFTISRDDSKNTAYLQMNNLKTEDTAVYYCVRHGNFGNSYLSWWAYWG |
| | Q46R_G141S- | | QGTLVTVSS |
| | VH | | |
| 253 | A2J_HC_Q46E_ | artificial | QTVVTQEPSLTVSPGGTVTITCRSSTGAVTSGYYPNWVQRKPGQAPRGLIGATDMRPS |
| | LC_L21I_ | | GTPARFSGSLLGGKAALTLSGVQPEDEAEYYCALWYSNRWVFGSGTKLTVL |
| | Q46R_G141S- | | |
| | VL | | |
| 254 | A2J_HC_Q46E_ | artificial | EVQLVESGGGLVQPGGSLKLSCAASGFTFNVYAMNWVREAPGKGLEWVARIRSKYNNY |
| | LC_Q46K- | | ATYYADSVKKRFTISRDDSKNTAYLQMNNLKTEDTAVYYCVRHGNFGNSYLSWWAYWG |
| | VH | | QGTLVTVSS |
| 255 | A2J_HC_Q46E_ | artificial | QTVVTQEPSLTVSPGGTVTLTCRSSTGAVTSGYYPNWVQKKPGQAPRGLIGATDMRPS |
| | LC_Q46K- | | GTPARFSGSLLGGKAALTLSGVQPEDEAEYYCALWYSNRWVFGGGTKLTVL |
| | VL | | |
| 256 | A2J_HC_Q46E_ | artificial | EVQLVESGGGLVQPGGSLKLSCAASGFTFNVYAMNWVREAPGKGLEWVARIRSKYNNY |
| | LC_Q46K_ | | ATYYADSVKKRFTISRDDSKNTAYLQMNNLKTEDTAVYYCVRHGNFGNSYLSWWAYWG |
| | G141S-VH | | QGTLVTVSS |
| 257 | A2J_HC_Q46E_ | artificial | QTVVTQEPSLTVSPGGTVTLTCRSSTGAVTSGYYPNWVQKKPGQAPRGLIGATDMRPS |
| | LC_Q46K_ | | GTPARFSGSLLGGKAALTLSGVQPEDEAEYYCALWYSNRWVFGSGTKLTVL |
| | G141S-VL | | |
| 258 | A2J_HC_Q46E_ | artificial | EVQLVESGGGLVQPGGSLKLSCAASGFTFNVYAMNWVREAPGKGLEWVARIRSKYNNY |
| | LC_Q46R- | | ATYYADSVKKRFTISRDDSKNTAYLQMNNLKTEDTAVYYCVRHGNFGNSYLSWWAYWG |
| | VH | | QGTLVTVSS |
| 259 | A2J_HC_Q46E_ | artificial | QTVVTQEPSLTVSPGGTVTLTCRSSTGAVTSGYYPNWVQRKPGQAPRGLIGATDMRPS |
| | LC_Q46R- | | GTPARFSGSLLGGKAALTLSGVQPEDEAEYYCALWYSNRWVFGGGTKLTVL |
| | VL | | |
| 260 | A2J_HC_Q46E_ | artificial | EVQLVESGGGLVQPGGSLKLSCAASGFTFNVYAMNWVREAPGKGLEWVARIRSKYNNY |
| | LC_Q46R_ | | ATYYADSVKKRFTISRDDSKNTAYLQMNNLKTEDTAVYYCVRHGNFGNSYLSWWAYWG |
| | G141S-VH | | QGTLVTVSS |
| 261 | A2J_HC_Q46E_ | artificial | QTVVTQEPSLTVSPGGTVTLTCRSSTGAVTSGYYPNWVQRKPGQAPRGLIGATDMRPS |
| | LC_Q46R_ | | GTPARFSGSLLGGKAALTLSGVQPEDEAEYYCALWYSNRWVFGSGTKLTVL |
| | G141S-VL | | |
| 262 | A2J_HC_Q46K | artificial | EVQLVESGGGLVQPGGSLKLSCAASGFTFNVYAMNWVRKAPGKGLEWVARIRSKYNNY |
| | -VH | | ATYYADSVKKRFTISRDDSKNTAYLQMNNLKTEDTAVYYCVRHGNFGNSYLSWWAYWG |
| | | | QGTLVTVSS |
| 263 | A2J_HC_Q46K | artificial | QTVVTQEPSLTVSPGGTVTLTCRSSTGAVTSGYYPNWVQQKPGQAPRGLIGATDMRPS |
| | -VL | | GTPARFSGSLLGGKAALTLSGVQPEDEAEYYCALWYSNRWVFGGGTKLTVL |
| 264 | A2J_HC_Q46R | artificial | EVQLVESGGGLVQPGGSLKLSCAASGFTFNVYAMNWVRRAPGKGLEWVARIRSKYNNY |
| | -VH | | ATYYADSVKKRFTISRDDSKNTAYLQMNNLKTEDTAVYYCVRHGNFGNSYLSWWAYWG |
| | | | QGTLVTVSS |
| 265 | A2J_HC_Q46R | artificial | QTVVTQEPSLTVSPGGTVTLTCRSSTGAVTSGYYPNWVQQKPGQAPRGLIGATDMRPS |
| | -VL | | GTPARFSGSLLGGKAALTLSGVQPEDEAEYYCALWYSNRWVFGGGTKLTVL |
| 266 | A2J_HC_V107A- | artificial | EVQLVESGGGLVQPGGSLKLSCAASGFTFNVYAMNWVRQAPGKGLEWVARIRSKYNNY |
| | VH | | ATYYADSVKKRFTISRDDSKNTAYLQMNNLKTEDTAVYYCARHGNFGNSYLSWWAYWG |
| | | | QGTLVTVSS |
| 267 | A2J_HC_V107A- | artificial | QTVVTQEPSLTVSPGGTVTLTCRSSTGAVTSGYYPNWVQQKPGQAPRGLIGATDMRPS |
| | VL | | GTPARFSGSLLGGKAALTLSGVQPEDEAEYYCALWYSNRWVFGGGTKLTVL |
| 268 | A2J_HC_V107L- | artificial | EVQLVESGGGLVQPGGSLKLSCAASGFTFNVYAMNWVRQAPGKGLEWVARIRSKYNNY |
| | VH | | ATYYADSVKKRFTISRDDSKNTAYLQMNNLKTEDTAVYYCLRHGNFGNSYLSWWAYWG |
| | | | QGTLVTVSS |
| 269 | A2J_HC_V107L- | artificial | QTVVTQEPSLTVSPGGTVTLTCRSSTGAVTSGYYPNWVQQKPGQAPRGLIGATDMRPS |
| | VL | | GTPARFSGSLLGGKAALTLSGVQPEDEAEYYCALWYSNRWVFGGGTKLTVL |
| 270 | A2J_HC_W136F- | artificial | VYAMN |
| | HCDR1 | | |
| 271 | A2J_HC_W136F- | artificial | RIRSKYNNYATYYADSVKK |
| | HCDR2 | | |
| 272 | A2J_HC_W136F- | artificial | HGNFGNSYLSWFAY |
| | HCDR3 | | |
| 273 | A2J_HC_W136F- | artificial | RSSTGAVTSGYYPN |
| | LCDR1 | | |
| 274 | A2J_HC_W136F- | artificial | ATDMRPS |
| | LCDR2 | | |
| 275 | A2J_HC_W136F- | artificial | ALWYSNRWV |
| | LCDR3 | | |
| 276 | A2J_HC_W136F- | artificial | EVQLVESGGGLVQPGGSLKLSCAASGFTFNVYAMNWVRQAPGKGLEWVARIRSKYNNY |
| | VH | | ATYYADSVKKRFTISRDDSKNTAYLQMNNLKTEDTAVYYCVRHGNFGNSYLSWFAYWG |
| | | | QGTLVTVSS |
| 277 | A2J_HC_W136F- | artificial | QTVVTQEPSLTVSPGGTVTLTCRSSTGAVTSGYYPNWVQQKPGQAPRGLIGATDMRPS |
| | VL | | GTPARFSGSLLGGKAALTLSGVQPEDEAEYYCALWYSNRWVFGGGTKLTVL |
| 278 | A2J_HC_W136F_ | artificial | EVQLVESGGGLVQPGGSLKLSCAASGFTFNVYAMNWVRQAPGKGLEWVARIRSKYNNY |
| | LC_V44I- | | ATYYADSVKKRFTISRDDSKNTAYLQMNNLKTEDTAVYYCVRHGNFGNSYLSWFAYWG |
| | VH | | QGTLVTVSS |
| 279 | A2J_HC_W136F_ | artificial | QTVVTQEPSLTVSPGGTVTLTCRSSTGAVTSGYYPNWIQQKPGQAPRGLIGATDMRPS |
| | LC_V44I- | | GTPARFSGSLLGGKAALTLSGVQPEDEAEYYCALWYSNRWVFGGGTKLTVL |
| | VL | | |
| 280 | A2J_HC_W136F_ | artificial | EVQLVESGGGLVQPGGSLKLSCAASGFTFNVYAMNWVRQAPGKGLEWVARIRSKYNNY |
| | LC_V44L- | | ATYYADSVKKRFTISRDDSKNTAYLQMNNLKTEDTAVYYCVRHGNFGNSYLSWFAYWG |
| | VH | | QGTLVTVSS |
| 281 | A2J_HC_W136F_ | artificial | QTVVTQEPSLTVSPGGTVTLTCRSSTGAVTSGYYPNWLQQKPGQAPRGLIGATDMRPS |
| | LC_V44L- | | GTPARFSGSLLGGKAALTLSGVQPEDEAEYYCALWYSNRWVFGGGTKLTVL |
| | VL | | |
| 282 | A2J_I2E- | artificial | VYAIN |
| | HCDR1 | | |
| 283 | A2J_I2E- | artificial | RIRSKYNNYATYYADAVKK |
| | HCDR2 | | |
| 284 | A2J_I2E- | artificial | AGNFGSSYLSWWAY |
| | HCDR3 | | |
| 285 | A2J_I2E- | artificial | RSSTGAVTSGYYPN |
| | LCDR1 | | |
| 286 | A2J_I2E- | artificial | ATDMRPS |
| | LCDR2 | | |
| 287 | A2J_I2E- | artificial | ALWYSNRWV |
| | LCDR3 | | |
| 288 | A2J_I2E- | artificial | EVQLVESGGGLVQPGGSLKLSCAASGFTFNVYAINWVRQAPGKGLEWVARIRSKYNNY |
| | VH | | ATYYADAVKKRFTISRDDSKNTVYLQMNNLKTEDTAVYYCARAGNFGSSYLSWWAYWG |
| | | | QGTLVTVSS |
| 289 | A2J_I2E- | artificial | QTVVTQEPSLTVSPGGTVTITCRSSTGAVTSGYYPNWVQKKPGQAPRGLIGATDMRPS |
| | VL | | GTPARFSGSLSGGKAALTLSGVQPEDEAEYYCALWYSNRWVFGSGTKLTVL |
| 290 | A2J_I2K- | artificial | VYAMN |
| | HCDR1 | | |
| 291 | A2J_I2K- | artificial | RIRSKYNNYATYYAEAVKG |
| | HCDR2 | | |
| 292 | A2J_I2K- | artificial | NENIGTSYLSWWAY |
| | HCDR3 | | |
| 293 | A2J_I2K- | artificial | RSSTGAVTSGYYPN |
| | LCDR1 | | |
| 294 | A2J_I2K- | artificial | ATDMRPS |
| | LCDR2 | | |
| 295 | A2J_I2K- | artificial | ALWYSNRWV |
| | LCDR3 | | |
| 296 | A2J_I2K- | artificial | EVQLVESGGGLVQPGGSLKLSCAASGFTFNVYAMNWVRQAPGKGLEWVARIRSKYNNY |
| | VH | | ATYYAEAVKGRFTISRDDSKNTVYLQMNNLKTEDTAVYYCVRNENIGTSYLSWWAYWG |
| | | | QGTLVTVSS |
| 297 | A2J_I2K- | artificial | QTVVTQEPSLTVSPGGTVTITCRSSTGAVTSGYYPNWVQQKPGQAPRGLIGATDMRPS |
| | VL | | GTPARFSGSLSGGKAALTLSGVQPEDEAEYYCALWYSNRWVFGSGTKLTVL |
| 298 | A2J_I2L- | artificial | VYAMN |
| | HCDR1 | | |
| 299 | A2J_I2L- | artificial | RIRSKYNNYATYYADAVKK |
| | HCDR2 | | |
| 300 | A2J_I2L- | artificial | AGNFGSSYLSWFAY |
| | HCDR3 | | |
| 301 | A2J_I2L- | artificial | RSSTGAVTSGYYPN |
| | LCDR1 | | |
| 302 | A2J_I2L- | artificial | ATDMRPS |
| | LCDR2 | | |
| 303 | A2J_I2L- | artificial | ALYYSNRWV |
| | LCDR3 | | |
| 304 | A2J_I2L- | artificial | EVQLVESGGGLVQPGGSLKLSCAASGFTFNVYAMNWVRQAPGKGMEWVARIRSKYNNY |
| | VH | | ATYYADAVKKRFTISRDDSKNTLYLQMNNLKTEDTAVYYCVRAGNFGSSYLSWFAYWG |
| | | | QGTLVTVSS |
| 305 | A2J_I2L- | artificial | QTVVTQEPSLTVSPGGTVTITCRSSTGAVTSGYYPNWIQKKPGQAPRGLIGATDMRPS |
| | VL | | GTPARFSGSLEGGKAALTLSGVQPEDEAEYYCALYYSNRWVFGSGTKLTVL |
| 306 | A2J_I2M- | artificial | VYAMN |
| | HCDR1 | | |
| 307 | A2J_I2M- | artificial | RIRSKYNNYATYYADAVKK |
| | HCDR2 | | |
| 308 | A2J_I2M- | artificial | AGNFGTSYLSWWAY |
| | HCDR3 | | |
| 309 | A2J_I2M- | artificial | RSSTGAVTSGYYPN |
| | LCDR1 | | |
| 310 | A2J_I2M- | artificial | ATDMRPS |
| | LCDR2 | | |
| 311 | A2J_I2M- | artificial | ALWYSNRWV |
| | LCDR3 | | |
| 312 | A2J_I2M- | artificial | EVQLVESGGGLVQPGGSLKLSCAASGFTFNVYAMNWVRQAPGKGMEWVARIRSKYNNY |
| | VH | | ATYYADAVKKRFTISRDDSKNTLYLQMNNLKTEDTAVYYCVRAGNFGTSYLSWWAYWG |
| | | | QGTLVTVSS |
| 313 | A2J_I2M- | artificial | QTVVTQEPSLTVSPGGTVTITCRSSTGAVTSGYYPNWVQKKPGQAPRGLIGATDMRPS |
| | VL | | GTPARFSGSLSGGKAALTLSGVQPEDEAEYYCALWYSNRWVFGSGTKLTVL |
| 314 | A2J_I2M2- | artificial | VYAIN |
| | HCDR1 | | |
| 315 | A2J_I2M2- | artificial | RIRSKYNNYATYYADAVKK |
| | HCDR2 | | |
| 316 | A2J_I2M2- | artificial | NANFGTSYLSWFAY |
| | HCDR3 | | |
| 317 | A2J_I2M2- | artificial | RSSTGAVTSGYYPN |
| | LCDR1 | | |
| 318 | A2J_I2M2- | artificial | ATDMRPS |
| | LCDR2 | | |
| 319 | A2J_I2M2- | artificial | ALWYSNRWV |
| | LCDR3 | | |
| 320 | A2J_I2M2- | artificial | EVQLVESGGGLVQPGGSLKLSCAASGFTFNVYAINWVREAPGKGLEWVARIRSKYNNY |
| | VH | | ATYYADAVKKRFTISRDDSKNTAYLQMNNLKTEDTAVYYCVRNANFGTSYLSWFAYWG |
| | | | QGTLVTVSS |
| 321 | A2J_I2M2- | artificial | QTVVTQEPSLTVSPGGTVTLTCRSSTGAVTSGYYPNWVQKKPGQAPRGLIGATDMRPS |
| | VL | | GTPARFSGSLLGGKAALTLSGVQPEDEAEYYCALWYSNRWVFGSGTKLTVL |
| 322 | A2J_LC_G141S- | artificial | EVQLVESGGGLVQPGGSLKLSCAASGFTFNVYAMNWVRQAPGKGLEWVARIRSKYNNY |
| | VH | | ATYYADSVKKRFTISRDDSKNTAYLQMNNLKTEDTAVYYCVRHGNFGNSYLSWWAYWG |
| | | | QGTLVTVSS |
| 323 | A2J_LC_G141S- | artificial | QTVVTQEPSLTVSPGGTVTLTCRSSTGAVTSGYYPNWVQQKPGQAPRGLIGATDMRPS |
| | VL | | GTPARFSGSLLGGKAALTLSGVQPEDEAEYYCALWYSNRWVFGSGTKLTVL |
| 324 | A2J_LC_G141S_ | artificial | EVQLVESGGGLVQPGGSLKLSCAASGFTFNVYAMNWVRQAPGKGLEWVARIRSKYNNY |
| | L21I-VH | | ATYYADSVKKRFTISRDDSKNTAYLQMNNLKTEDTAVYYCVRHGNFGNSYLSWWAYWG |
| | | | QGTLVTVSS |
| 325 | A2J_LC_G141S_ | artificial | QTVVTQEPSLTVSPGGTVTITCRSSTGAVTSGYYPNWVQQKPGQAPRGLIGATDMRPS |
| | L21I-VL | | GTPARFSGSLLGGKAALTLSGVQPEDEAEYYCALWYSNRWVFGSGTKLTVL |
| 326 | A2J_LC_L83E | artificial | EVQLVESGGGLVQPGGSLKLSCAASGFTFNVYAMNWVRQAPGKGLEWVARIRSKYNNY |
| | -VH | | ATYYADSVKKRFTISRDDSKNTAYLQMNNLKTEDTAVYYCVRHGNFGNSYLSWWAYWG |
| | | | QGTLVTVSS |
| 327 | A2J_LC_L83E | artificial | QTVVTQEPSLTVSPGGTVTLTCRSSTGAVTSGYYPNWVQQKPGQAPRGLIGATDMRPS |
| | -VL | | GTPARFSGSLEGGKAALTLSGVQPEDEAEYYCALWYSNRWVFGGGTKLTVL |
| 328 | A2J_LC_L83S | artificial | EVQLVESGGGLVQPGGSLKLSCAASGFTFNVYAMNWVRQAPGKGLEWVARIRSKYNNY |
| | -VH | | ATYYADSVKKRFTISRDDSKNTAYLQMNNLKTEDTAVYYCVRHGNFGNSYLSWWAYWG |
| | | | QGTLVTVSS |
| 329 | A2J_LC_L83S | artificial | QTVVTQEPSLTVSPGGTVTLTCRSSTGAVTSGYYPNWVQQKPGQAPRGLIGATDMRPS |
| | -VL | | GTPARFSGSLSGGKAALTLSGVQPEDEAEYYCALWYSNRWVFGGGTKLTVL |
| 330 | A2J_LC_Q46E | artificial | EVQLVESGGGLVQPGGSLKLSCAASGFTFNVYAMNWVRQAPGKGLEWVARIRSKYNNY |
| | -VH | | ATYYADSVKKRFTISRDDSKNTAYLQMNNLKTEDTAVYYCVRHGNFGNSYLSWWAYWG |
| | | | QGTLVTVSS |
| 331 | A2J_LC_Q46E | artificial | QTVVTQEPSLTVSPGGTVTLTCRSSTGAVTSGYYPNWVQEKPGQAPRGLIGATDMRPS |
| | -VL | | GTPARFSGSLLGGKAALTLSGVQPEDEAEYYCALWYSNRWVFGGGTKLTVL |
| 332 | A2J_LC_Q46K | artificial | EVQLVESGGGLVQPGGSLKLSCAASGFTFNVYAMNWVRQAPGKGLEWVARIRSKYNNY |
| | -VH | | ATYYADSVKKRFTISRDDSKNTAYLQMNNLKTEDTAVYYCVRHGNFGNSYLSWWAYWG |
| | | | QGTLVTVSS |
| 333 | A2J_LC_Q46K | artificial | QTVVTQEPSLTVSPGGTVTLTCRSSTGAVTSGYYPNWVQKKPGQAPRGLIGATDMRPS |
| | -VL | | GTPARFSGSLLGGKAALTLSGVQPEDEAEYYCALWYSNRWVFGGGTKLTVL |
| 334 | A2J_LC_A107L- | artificial | VYAMN |
| | HCDR1 | | |
| 335 | A2J_LC_A107L- | artificial | RIRSKYNNYATYYADSVKK |
| | HCDR2 | | |
| 336 | A2J_LC_A107L- | artificial | HGNFGNSYLSWWAY |
| | HCDR3 | | |
| 337 | A2J_LC_A107L- | artificial | RSSTGAVTSGYYPN |
| | LCDR1 | | |
| 338 | A2J_LC_A107L- | artificial | ATDMRPS |
| | LCDR2 | | |
| 339 | A2J_LC_A107L- | artificial | LLWYSNRWV |
| | LCDR3 | | |
| 340 | A2J_LC_A107L- | artificial | EVQLVESGGGLVQPGGSLKLSCAASGFTFNVYAMNWVRQAPGKGLEWVARIRSKYNNY |
| | VH | | ATYYADSVKKRFTISRDDSKNTAYLQMNNLKTEDTAVYYCVRHGNFGNSYLSWWAYWG |
| | | | QGTLVTVSS |
| 341 | A2J_LC_A107L- | artificial | QTVVTQEPSLTVSPGGTVTLTCRSSTGAVTSGYYPNWVQQKPGQAPRGLIGATDMRPS |
| | VL | | GTPARFSGSLLGGKAALTLSGVQPEDEAEYYCLLWYSNRWVFGGGTKLTVL |
| 342 | A2J_LC_V44I | artificial | EVQLVESGGGLVQPGGSLKLSCAASGFTFNVYAMNWVRQAPGKGLEWVARIRSKYNNY |
| | -VH | | ATYYADSVKKRFTISRDDSKNTAYLQMNNLKTEDTAVYYCVRHGNFGNSYLSWWAYWG |
| | | | QGTLVTVSS |
| 343 | A2J_LC_V44I | artificial | QTVVTQEPSLTVSPGGTVTLTCRSSTGAVTSGYYPNWIQQKPGQAPRGLIGATDMRPS |
| | -VL | | GTPARFSGSLLGGKAALTLSGVQPEDEAEYYCALWYSNRWVFGGGTKLTVL |
| 344 | A2J_LC_V44L | artificial | EVQLVESGGGLVQPGGSLKLSCAASGFTFNVYAMNWVRQAPGKGLEWVARIRSKYNNY |
| | -VH | | ATYYADSVKKRFTISRDDSKNTAYLQMNNLKTEDTAVYYCVRHGNFGNSYLSWWAYWG |
| | | | QGTLVTVSS |
| 345 | A2J_LC_V44L | artificial | QTVVTQEPSLTVSPGGTVTLTCRSSTGAVTSGYYPNWLQQKPGQAPRGLIGATDMRPS |
| | -VL | | GTPARFSGSLLGGKAALTLSGVQPEDEAEYYCALWYSNRWVFGGGTKLTVL |
| 346 | A2J_LC_V44M | artificial | EVQLVESGGGLVQPGGSLKLSCAASGFTFNVYAMNWVRQAPGKGLEWVARIRSKYNNY |
| | -VH | | ATYYADSVKKRFTISRDDSKNTAYLQMNNLKTEDTAVYYCVRHGNFGNSYLSWWAYWG |
| | | | QGTLVTVSS |
| 347 | A2J_LC_V44M | artificial | QTVVTQEPSLTVSPGGTVTLTCRSSTGAVTSGYYPNWMQQKPGQAPRGLIGATDMRPS |
| | -VL | | GTPARFSGSLLGGKAALTLSGVQPEDEAEYYCALWYSNRWVFGGGTKLTVL |
| 348 | A2J_LC_W109Y- | artificial | VYAMN |
| | HCDR1 | | |
| 349 | A2J_LC_W109Y- | artificial | RIRSKYNNYATYYADSVKK |
| | HCDR2 | | |
| 350 | A2J_LC_W109Y- | artificial | HGNFGNSYLSWWAY |
| | HCDR3 | | |
| 351 | A2J_LC_W109Y- | artificial | RSSTGAVTSGYYPN |
| | LCDR1 | | |
| 352 | A2J_LC_W109Y- | artificial | ATDMRPS |
| | LCDR2 | | |
| 353 | A2J_LC_W109Y- | artificial | ALYYSNRWV |
| | LCDR3 | | |
| 354 | A2J_LC_W109Y- | artificial | EVQLVESGGGLVQPGGSLKLSCAASGFTFNVYAMNWVRQAPGKGLEWVARIRSKYNNY |
| | VH | | ATYYADSVKKRFTISRDDSKNTAYLQMNNLKTEDTAVYYCVRHGNFGNSYLSWWAYWG |
| | | | QGTLVTVSS |
| 355 | A2J_LC_W109Y- | artificial | QTVVTQEPSLTVSPGGTVTLTCRSSTGAVTSGYYPNWVQQKPGQAPRGLIGATDMRPS |
| | VL | | GTPARFSGSLLGGKAALTLSGVQPEDEAEYYCALYYSNRWVFGGGTKLTVL |
| 356 | E1L-HCDR1 | artificial | KYAMN |
| 357 | E1L-HCDR2 | artificial | RIRSKYNNYATYYADSVKS |
| 358 | E1L-HCDR3 | artificial | HGNFGNSYTSYYAY |
| 359 | E1L-LCDR1 | artificial | GSSTGAVTSGYYPN |
| 360 | E1L-LCDR2 | artificial | GTKFLAP |
| 361 | E1L-LCDR3 | artificial | ALWYSNRWV |
| 362 | E1L-VH | artificial | EVQLVESGGGLVQPGGSLKLSCAASGFTFNKYAMNWVRQAPGKGLEWVARIRSKYNNY |
| | | | ATYYADSVKSRFTISRDDSKNTAYLQMNNLKTEDTAVYYCVRHGNFGNSYTSYYAYWG |
| | | | QGTLVTVSS |
| 363 | E1L-VL | artificial | QTVVTQEPSLTVSPGGTVTLTCGSSTGAVTSGYYPNWVQQKPGQAPRGLIGGTKFLAP |
| | | | GTPARFSGSLLGGKAALTLSGVQPEDEAEYYCALWYSNRWVFGGGTKLTVL |
| 364 | E1L_HC_A89I | artificial | EVQLVESGGGLVQPGGSLKLSCAASGFTFNKYAMNWVRQAPGKGLEWVARIRSKYNNY |
| | -VH | | ATYYADSVKSRFTISRDDSKNTIYLQMNNLKTEDTAVYYCVRHGNFGNSYTSYYAYWG |
| | | | QGTLVTVSS |
| 365 | E1L_HC_A89I | artificial | QTVVTQEPSLTVSPGGTVTLTCGSSTGAVTSGYYPNWVQQKPGQAPRGLIGGTKFLAP |
| | -VL | | GTPARFSGSLLGGKAALTLSGVQPEDEAEYYCALWYSNRWVFGGGTKLTVL |
| 366 | E1L_HC_A89L | artificial | EVQLVESGGGLVQPGGSLKLSCAASGFTFNKYAMNWVRQAPGKGLEWVARIRSKYNNY |
| | -VH | | ATYYADSVKSRFTISRDDSKNTLYLQMNNLKTEDTAVYYCVRHGNFGNSYTSYYAYWG |
| | | | QGTLVTVSS |
| 367 | E1L_HC_A89L | artificial | QTVVTQEPSLTVSPGGTVTLTCGSSTGAVTSGYYPNWVQQKPGQAPRGLIGGTKFLAP |
| | -VL | | GTPARFSGSLLGGKAALTLSGVQPEDEAEYYCALWYSNRWVFGGGTKLTVL |
| 368 | E1L_HC_A89T | artificial | EVQLVESGGGLVQPGGSLKLSCAASGFTFNKYAMNWVRQAPGKGLEWVARIRSKYNNY |
| | -VH | | ATYYADSVKSRFTISRDDSKNTTYLQMNNLKTEDTAVYYCVRHGNFGNSYTSYYAYWG |
| | | | QGTLVTVSS |
| 369 | E1L_HC_A89T | artificial | QTVVTQEPSLTVSPGGTVTLTCGSSTGAVTSGYYPNWVQQKPGQAPRGLIGGTKFLAP |
| | -VL | | GTPARFSGSLLGGKAALTLSGVQPEDEAEYYCALWYSNRWVFGGGTKLTVL |
| 370 | E1L_HC_A89V | artificial | EVQLVESGGGLVQPGGSLKLSCAASGFTFNKYAMNWVRQAPGKGLEWVARIRSKYNNY |
| | -VH | | ATYYADSVKSRFTISRDDSKNTVYLQMNNLKTEDTAVYYCVRHGNFGNSYTSYYAYWG |
| | | | QGTLVTVSS |
| 371 | E1L_HC_A89V | artificial | QTVVTQEPSLTVSPGGTVTLTCGSSTGAVTSGYYPNWVQQKPGQAPRGLIGGTKFLAP |
| | -VL | | GTPARFSGSLLGGKAALTLSGVQPEDEAEYYCALWYSNRWVFGGGTKLTVL |
| 372 | E1L_HC_L52M | artificial | EVQLVESGGGLVQPGGSLKLSCAASGFTENKYAMNWVRQAPGKGMEWVARIRSKYNNY |
| | -VH | | ATYYADSVKSRFTISRDDSKNTAYLQMNNLKTEDTAVYYCVRHGNFGNSYTSYYAYWG |
| | | | QGTLVTVSS |
| 373 | E1L_HC_L52M | artificial | QTVVTQEPSLTVSPGGTVTLTCGSSTGAVTSGYYPNWVQQKPGQAPRGLIGGTKFLAP |
| | -VL | | GTPARFSGSLLGGKAALTLSGVQPEDEAEYYCALWYSNRWVFGGGTKLTVL |
| 374 | E1L_HC_L52M_ | artificial | EVQLVESGGGLVQPGGSLKLSCAASGFTFNKYAMNWVRQAPGKGMEWVARIRSKYNNY |
| | LC_L21I_ | | ATYYADSVKSRFTISRDDSKNTAYLQMNNLKTEDTAVYYCVRHGNFGNSYTSYYAYWG |
| | Q46K_G141S- | | QGTLVTVSS |
| | VH | | |
| 375 | E1L_HC_L52M_ | artificial | QTVVTQEPSLTVSPGGTVTITCGSSTGAVTSGYYPNWVQKKPGQAPRGLIGGTKFLAP |
| | LC_L21I_ | | GTPARFSGSLLGGKAALTLSGVQPEDEAEYYCALWYSNRWVFGSGTKLTVL |
| | Q46K_G141S- | | |
| | VL | | |
| 376 | E1L_HC_L52M_ | artificial | EVQLVESGGGLVQPGGSLKLSCAASGFTFNKYAMNWVRQAPGKGMEWVARIRSKYNNY |
| | LC_Q46K- | | ATYYADSVKSRFTISRDDSKNTAYLQMNNLKTEDTAVYYCVRHGNFGNSYTSYYAYWG |
| | VH | | QGTLVTVSS |
| 377 | E1L_HC_L52M_ | artificial | QTVVTQEPSLTVSPGGTVTLTCGSSTGAVTSGYYPNWVQKKPGQAPRGLIGGTKFLAP |
| | LC_Q46K- | | GTPARFSGSLLGGKAALTLSGVQPEDEAEYYCALWYSNRWVFGGGTKLTVL |
| | VL | | |
| 378 | E1L_HC_L52M_ | artificial | EVQLVESGGGLVQPGGSLKLSCAASGFTFNKYAMNWVRQAPGKGMEWVARIRSKYNNY |
| | LC_Q46K_ | | ATYYADSVKSRFTISRDDSKNTAYLQMNNLKTEDTAVYYCVRHGNFGNSYTSYYAYWG |
| | 4G11S-VH | | QGTLVTVSS |
| 379 | E1L_HC_L52M_ | artificial | QTVVTQEPSLTVSPGGTVTLTCGSSTGAVTSGYYPNWVQKKPGQAPRGLIGGTKFLAP |
| | LC_Q46K_ | | GTPARFSGSLLGGKAALTLSGVQPEDEAEYYCALWYSNRWVFGSGTKLTVL |
| | G141S-VL | | |
| 380 | E1L_HC_L52V | artificial | EVQLVESGGGLVQPGGSLKLSCAASGFTFNKYAMNWVRQAPGKGVEWVARIRSKYNNY |
| | -VH | | ATYYADSVKSRFTISRDDSKNTAYLQMNNLKTEDTAVYYCVRHGNFGNSYTSYYAYWG |
| | | | QGTLVTVSS |
| 381 | E1L_HC_L52V | artificial | QTVVTQEPSLTVSPGGTVTLTCGSSTGAVTSGYYPNWVQQKPGQAPRGLIGGTKFLAP |
| | -VL | | GTPARFSGSLLGGKAALTLSGVQPEDEAEYYCALWYSNRWVFGGGTKLTVL |
| 382 | E1L_HC_L52V_ | artificial | EVQLVESGGGLVQPGGSLKLSCAASGFTFNKYAMNWVRQAPGKGVEWVARIRSKYNNY |
| | LC_V44F- | | ATYYADSVKSRFTISRDDSKNTAYLQMNNLKTEDTAVYYCVRHGNFGNSYTSYYAYWG |
| | VH | | QGTLVTVSS |
| 383 | E1L_HC_L52V_ | artificial | QTVVTQEPSLTVSPGGTVTLTCGSSTGAVTSGYYPNWFQQKPGQAPRGLIGGTKFLAP |
| | LC_V44F- | | GTPARFSGSLLGGKAALTLSGVQPEDEAEYYCALWYSNRWVFGGGTKLTVL |
| | VL | | |
| 384 | E1L_HC_L52V_ | artificial | EVQLVESGGGLVQPGGSLKLSCAASGFTFNKYAMNWVRQAPGKGVEWVARIRSKYNNY |
| | LC_V44Y- | | ATYYADSVKSRFTISRDDSKNTAYLQMNNLKTEDTAVYYCVRHGNFGNSYTSYYAYWG |
| | VH | | QGTLVTVSS |
| 385 | E1L_HC_L52V_ | artificial | QTVVTQEPSLTVSPGGTVTLTCGSSTGAVTSGYYPNWYQQKPGQAPRGLIGGTKFLAP |
| | LC_V44Y- | | GTPARFSGSLLGGKAALTLSGVQPEDEAEYYCALWYSNRWVFGGGTKLTVL |
| | VL | | |
| 386 | E1L_HC_M41F_ | artificial | KYAFN |
| | A89V- | | |
| | HCDR1 | | |
| 387 | E1L_HC_M41F_ | artificial | RIRSKYNNYATYYADSVKS |
| | A89V-HCDR2 | | |
| 388 | E1L_HC_M41F_ | artificial | HGNFGNSYTSYYAY |
| | A89V- | | |
| | HCDR3 | | |
| 389 | E1L_HC_M41F_ | artificial | GSSTGAVTSGYYPN |
| | A89V- | | |
| | LCDR1 | | |
| 390 | E1L_HC_M41F_ | artificial | GTKFLAP |
| | A89V- | | |
| | LCDR2 | | |
| 391 | E1L_HC_M41F_ | artificial | ALWYSNRWV |
| | A89V-LCDR3 | | |
| 392 | E1L_HC_M41F_ | artificial | EVQLVESGGGLVQPGGSLKLSCAASGFTFNKYAFNWVRQAPGKGLEWVARIRSKYNNY |
| | A89V-VH | | ATYYADSVKSRFTISRDDSKNTVYLQMNNLKTEDTAVYYCVRHGNFGNSYTSYYAYWG |
| | | | QGTLVTVSS |
| 393 | E1L_HC_M41F_ | artificial | QTVVTQEPSLTVSPGGTVTLTCGSSTGAVTSGYYPNWVQQKPGQAPRGLIGGTKFLAP |
| | A89V-VL | | GTPARFSGSLLGGKAALTLSGVQPEDEAEYYCALWYSNRWVFGGGTKLTVL |
| 394 | E1L_HC_M41I | artificial | KYAIN |
| | -HCDR1 | | |
| 395 | E1L_HC_M41I | artificial | RIRSKYNNYATYYADSVKS |
| | -HCDR2 | | |
| 396 | E1L_HC_M41I | artificial | HGNFGNSYTSYYAY |
| | -HCDR3 | | |
| 397 | E1L_HC_M41I | artificial | GSSTGAVTSGYYPN |
| | -LCDR1 | | |
| 398 | E1L_HC_M41I | artificial | GTKFLAP |
| | -LCDR2 | | |
| 399 | E1L_HC_M41I | artificial | ALWYSNRWV |
| | -LCDR3 | | |
| 400 | E1L_HC_M41I | artificial | EVQLVESGGGLVQPGGSLKLSCAASGFTFNKYAINWVRQAPGKGLEWVARIRSKYNNY |
| | -VH | | ATYYADSVKSRFTISRDDSKNTAYLQMNNLKTEDTAVYYCVRHGNFGNSYTSYYAYWG |
| | | | QGTLVTVSS |
| 401 | E1L_HC_M41I | artificial | QTVVTQEPSLTVSPGGTVTLTCGSSTGAVTSGYYPNWVQQKPGQAPRGLIGGTKFLAP |
| | -VL | | GTPARFSGSLLGGKAALTLSGVQPEDEAEYYCALWYSNRWVFGGGTKLTVL |
| 402 | E1L_HC_M41I_ | artificial | EVQLVESGGGLVQPGGSLKLSCAASGFTFNKYAINWVRQAPGKGLEWVARIRSKYNNY |
| | A89L-VH | | ATYYADSVKSRFTISRDDSKNTLYLQMNNLKTEDTAVYYCVRHGNFGNSYTSYYAYWG |
| | | | QGTLVTVSS |
| 403 | E1L_HC_M41I_ | artificial | QTVVTQEPSLTVSPGGTVTLTCGSSTGAVTSGYYPNWVQQKPGQAPRGLIGGTKFLAP |
| | A89L-VL | | GTPARFSGSLLGGKAALTLSGVQPEDEAEYYCALWYSNRWVFGGGTKLTVL |
| 404 | E1L_HC_M41I_ | artificial | EVQLVESGGGLVQPGGSLKLSCAASGFTENKYAINWVRQAPGKGLEWVARIRSKYNNY |
| | A89V-VH | | ATYYADSVKSRFTISRDDSKNTVYLQMNNLKTEDTAVYYCVRHGNFGNSYTSYYAYWG |
| | | | QGTLVTVSS |
| 405 | E1L_HC_M41I_ | artificial | QTVVTQEPSLTVSPGGTVTLTCGSSTGAVTSGYYPNWVQQKPGQAPRGLIGGTKFLAP |
| | A89V-VL | | GTPARFSGSLLGGKAALTLSGVQPEDEAEYYCALWYSNRWVFGGGTKLTVL |
| 406 | E1L_HC_M41I_ | artificial | EVQLVESGGGLVQPGGSLKLSCAASGFTFNKYAINWVRQAPGKGLEWVARIRSKYNNY |
| | A89V_LC_ | | ATYYADSVKSRFTISRDDSKNTVYLQMNNLKTEDTAVYYCVRHGNFGNSYTSYYAYWG |
| | L21I_Q46K_ | | QGTLVTVSS |
| | G141S-VH | | |
| 407 | E1L_HC_M41I_ | artificial | QTVVTQEPSLTVSPGGTVTITCGSSTGAVTSGYYPNWVQKKPGQAPRGLIGGTKFLAP |
| | A89V_LC_ | | GTPARFSGSLLGGKAALTLSGVQPEDEAEYYCALWYSNRWVFGSGTKLTVL |
| | L21I_Q46K_ | | |
| | G141S-VL | | |
| 408 | E1L_HC_M41I_ | artificial | EVQLVESGGGLVQPGGSLKLSCAASGFTFNKYAINWVRQAPGKGLEWVARIRSKYNNY |
| | A89V_LC_ | | ATYYADSVKSRFTISRDDSKNTVYLQMNNLKTEDTAVYYCVRHGNFGNSYTSYYAYWG |
| | Q46K-VH | | QGTLVTVSS |
| 409 | E1L_HC_M41I_ | artificial | QTVVTQEPSLTVSPGGTVTLTCGSSTGAVTSGYYPNWVQKKPGQAPRGLIGGTKFLAP |
| | A89V_LC_ | | GTPARFSGSLLGGKAALTLSGVQPEDEAEYYCALWYSNRWVFGGGTKLTVL |
| | Q46K-VL | | |
| 410 | E1L_HC_M41I_ | artificial | EVQLVESGGGLVQPGGSLKLSCAASGFTENKYAINWVRQAPGKGVEWVARIRSKYNNY |
| | L52V_A89V_ | | ATYYADSVKSRFTISRDDSKNTVYLQMNNLKTEDTAVYYCVRHGNFGNSYTSYYAYWG |
| | LC_L21I_ | | QGTLVTVSS |
| | Q46K_G141S_ | | |
| | V44F-VH | | |
| 411 | E1L_HC_M41I_ | artificial | QTVVTQEPSLTVSPGGTVTITCGSSTGAVTSGYYPNWFQKKPGQAPRGLIGGTKFLAP |
| | L52V_A89V_ | | GTPARFSGSLLGGKAALTLSGVQPEDEAEYYCALWYSNRWVFGSGTKLTVL |
| | LC_L21I_ | | |
| | Q46K_G141S_ | | |
| | V44F-VL | | |
| 412 | E1L_HC_M41I_ | artificial | EVQLVESGGGLVQPGGSLKLSCAASGFTFNKYAINWVRQAPGKGLEWVARIRSKYNNY |
| | LC_L21I_ | | ATYYADSVKSRFTISRDDSKNTAYLQMNNLKTEDTAVYYCVRHGNFGNSYTSYYAYWG |
| | Q46K_G141S- | | QGTLVTVSS |
| | VH | | |
| 413 | E1L_HC_M41I_ | artificial | QTVVTQEPSLTVSPGGTVTITCGSSTGAVTSGYYPNWVQKKPGQAPRGLIGGTKFLAP |
| | LC_L21I_ | | GTPARFSGSLLGGKAALTLSGVQPEDEAEYYCALWYSNRWVFGSGTKLTVL |
| | Q46K_G141S- | | |
| | VL | | |
| 414 | E1L_HC_M41I_ | artificial | EVQLVESGGGLVQPGGSLKLSCAASGFTFNKYAINWVREAPGKGLEWVARIRSKYNNY |
| | Q46E_A89V_ | | ATYYADSVKSRFTISRDDSKNTVYLQMNNLKTEDTAVYYCVRHGNFGNSYTSYYAYWG |
| | LC_L21I_ | | QGTLVTVSS |
| | Q46K_G141S- | | |
| | VH | | |
| 415 | E1L_HC_M41I_ | artificial | QTVVTQEPSLTVSPGGTVTITCGSSTGAVTSGYYPNWVQKKPGQAPRGLIGGTKFLAP |
| | Q46E_A89V_ | | GTPARFSGSLLGGKAALTLSGVQPEDEAEYYCALWYSNRWVFGSGTKLTVL |
| | LC_L21I_ | | |
| | Q46K_G141S- | | |
| | VL | | |
| 416 | E1L_HC_M41V | artificial | KYAVN |
| | -HCDR1 | | |
| 417 | E1L_HC_M41V | artificial | RIRSKYNNYATYYADSVKS |
| | -HCDR2 | | |
| 418 | E1L_HC_M41V | artificial | HGNFGNSYTSYYAY |
| | -HCDR3 | | |
| 419 | E1L_HC_M41V | artificial | GSSTGAVTSGYYPN |
| | -LCDR1 | | |
| 420 | E1L_HC_M41V | artificial | GTKFLAP |
| | -LCDR2 | | |
| 421 | E1L_HC_M41V | artificial | ALWYSNRWV |
| | -LCDR3 | | |
| 422 | E1L_HC_M41V | artificial | EVQLVESGGGLVQPGGSLKLSCAASGFTFNKYAVNWVRQAPGKGLEWVARIRSKYNNY |
| | -VH | | ATYYADSVKSRFTISRDDSKNTAYLQMNNLKTEDTAVYYCVRHGNFGNSYTSYYAYWG |
| | | | QGTLVTVSS |
| 423 | E1L_HC_M41V | artificial | QTVVTQEPSLTVSPGGTVTLTCGSSTGAVTSGYYPNWVQQKPGQAPRGLIGGTKFLAP |
| | -VL | | GTPARFSGSLLGGKAALTLSGVQPEDEAEYYCALWYSNRWVFGGGTKLTVL |
| 424 | E1L_HC_Q46D | artificial | EVQLVESGGGLVQPGGSLKLSCAASGFTENKYAMNWVRDAPGKGLEWVARIRSKYNNY |
| | -VH | | ATYYADSVKSRFTISRDDSKNTAYLQMNNLKTEDTAVYYCVRHGNFGNSYTSYYAYWG |
| | | | QGTLVTVSS |
| 425 | E1L_HC_Q46D | artificial | QTVVTQEPSLTVSPGGTVTLTCGSSTGAVTSGYYPNWVQQKPGQAPRGLIGGTKFLAP |
| | -VL | | GTPARFSGSLLGGKAALTLSGVQPEDEAEYYCALWYSNRWVFGGGTKLTVL |
| 426 | E1L_HC_Q46D_ | artificial | EVQLVESGGGLVQPGGSLKLSCAASGFTFNKYAMNWVRDAPGKGLEWVARIRSKYNNY |
| | LC_L21I_ | | ATYYADSVKSRFTISRDDSKNTAYLQMNNLKTEDTAVYYCVRHGNFGNSYTSYYAYWG |
| | Q46K_G141S- | | QGTLVTVSS |
| | VH | | |
| 427 | E1L_HC_Q46D_ | artificial | QTVVTQEPSLTVSPGGTVTITCGSSTGAVTSGYYPNWVQKKPGQAPRGLIGGTKFLAP |
| | LC_L21I_ | | GTPARFSGSLLGGKAALTLSGVQPEDEAEYYCALWYSNRWVFGSGTKLTVL |
| | Q46K_G141S- | | |
| | VL | | |
| 428 | E1L_HC_Q46D_ | artificial | EVQLVESGGGLVQPGGSLKLSCAASGFTFNKYAMNWVRDAPGKGLEWVARIRSKYNNY |
| | LC_L21I_ | | ATYYADSVKSRFTISRDDSKNTAYLQMNNLKTEDTAVYYCVRHGNFGNSYTSYYAYWG |
| | Q46R_G141S- | | QGTLVTVSS |
| | VH | | |
| 429 | E1L_HC_Q46D_ | artificial | QTVVTQEPSLTVSPGGTVTITCGSSTGAVTSGYYPNWVQRKPGQAPRGLIGGTKFLAP |
| | LC_L21I_ | | GTPARFSGSLLGGKAALTLSGVQPEDEAEYYCALWYSNRWVFGSGTKLTVL |
| | Q46R_G141S- | | |
| | VL | | |
| 430 | E1L_HC_Q46D_ | artificial | EVQLVESGGGLVQPGGSLKLSCAASGFTFNKYAMNWVRDAPGKGLEWVARIRSKYNNY |
| | LC_Q46K- | | ATYYADSVKSRFTISRDDSKNTAYLQMNNLKTEDTAVYYCVRHGNFGNSYTSYYAYWG |
| | VH | | QGTLVTVSS |
| 431 | E1L_HC_Q46D_ | artificial | QTVVTQEPSLTVSPGGTVTLTCGSSTGAVTSGYYPNWVQKKPGQAPRGLIGGTKFLAP |
| | LC_Q46K- | | GTPARFSGSLLGGKAALTLSGVQPEDEAEYYCALWYSNRWVFGGGTKLTVL |
| | VL | | |
| 432 | E1L_HC_Q46D_ | artificial | EVQLVESGGGLVQPGGSLKLSCAASGFTFNKYAMNWVRDAPGKGLEWVARIRSKYNNY |
| | LC_Q46K_ | | ATYYADSVKSRFTISRDDSKNTAYLQMNNLKTEDTAVYYCVRHGNFGNSYTSYYAYWG |
| | G141S-VH | | QGTLVTVSS |
| 433 | E1L_HC_Q46D_ | artificial | QTVVTQEPSLTVSPGGTVTLTCGSSTGAVTSGYYPNWVQKKPGQAPRGLIGGTKFLAP |
| | LC_Q46K_ | | GTPARFSGSLLGGKAALTLSGVQPEDEAEYYCALWYSNRWVFGSGTKLTVL |
| | G141S-VL | | |
| 434 | E1L_HC_Q46D_ | artificial | EVQLVESGGGLVQPGGSLKLSCAASGFTFNKYAMNWVRDAPGKGLEWVARIRSKYNNY |
| | LC_Q46R- | | ATYYADSVKSRFTISRDDSKNTAYLQMNNLKTEDTAVYYCVRHGNFGNSYTSYYAYWG |
| | VH | | QGTLVTVSS |
| 435 | E1L_HC_Q46D_ | artificial | QTVVTQEPSLTVSPGGTVTLTCGSSTGAVTSGYYPNWVQRKPGQAPRGLIGGTKFLAP |
| | LC_Q46R- | | GTPARFSGSLLGGKAALTLSGVQPEDEAEYYCALWYSNRWVFGGGTKLTVL |
| | VL | | |
| 436 | E1L_HC_Q46D_ | artificial | EVQLVESGGGLVQPGGSLKLSCAASGFTFNKYAMNWVRDAPGKGLEWVARIRSKYNNY |
| | LC_Q46R_ | | ATYYADSVKSRFTISRDDSKNTAYLQMNNLKTEDTAVYYCVRHGNFGNSYTSYYAYWG |
| | G141S-VH | | QGTLVTVSS |
| 437 | E1L_HC_Q46D_ | artificial | QTVVTQEPSLTVSPGGTVTLTCGSSTGAVTSGYYPNWVQRKPGQAPRGLIGGTKFLAP |
| | LC_Q46R_ | | GTPARFSGSLLGGKAALTLSGVQPEDEAEYYCALWYSNRWVFGSGTKLTVL |
| | G141S-VL | | |
| 438 | E1L_HC_Q46E | artificial | EVQLVESGGGLVQPGGSLKLSCAASGFTFNKYAMNWVREAPGKGLEWVARIRSKYNNY |
| | -VH | | ATYYADSVKSRFTISRDDSKNTAYLQMNNLKTEDTAVYYCVRHGNFGNSYTSYYAYWG |
| | | | QGTLVTVSS |
| 439 | E1L_HC_Q46E | artificial | QTVVTQEPSLTVSPGGTVTLTCGSSTGAVTSGYYPNWVQQKPGQAPRGLIGGTKFLAP |
| | -VL | | GTPARFSGSLLGGKAALTLSGVQPEDEAEYYCALWYSNRWVFGGGTKLTVL |
| 440 | E1L_HC_Q46E_ | artificial | EVQLVESGGGLVQPGGSLKLSCAASGFTFNKYAMNWVREAPGKGLEWVARIRSKYNNY |
| | LC_L21I_ | | ATYYADSVKSRFTISRDDSKNTAYLQMNNLKTEDTAVYYCVRHGNFGNSYTSYYAYWG |
| | Q46K_G141S- | | QGTLVTVSS |
| | VH | | |
| 441 | E1L_HC_Q46E_ | artificial | QTVVTQEPSLTVSPGGTVTITCGSSTGAVTSGYYPNWVQKKPGQAPRGLIGGTKFLAP |
| | LC_L21I_ | | GTPARFSGSLLGGKAALTLSGVQPEDEAEYYCALWYSNRWVFGSGTKLTVL |
| | Q46K_G141S- | | |
| | VL | | |
| 442 | E1L_HC_Q46E_ | artificial | EVQLVESGGGLVQPGGSLKLSCAASGFTFNKYAMNWVREAPGKGLEWVARIRSKYNNY |
| | LC_L21I_ | | ATYYADSVKSRFTISRDDSKNTAYLQMNNLKTEDTAVYYCVRHGNFGNSYTSYYAYWG |
| | Q46R_G141S- | | QGTLVTVSS |
| | VH | | |
| 443 | E1L_HC_Q46E_ | artificial | QTVVTQEPSLTVSPGGTVTITCGSSTGAVTSGYYPNWVQRKPGQAPRGLIGGTKFLAP |
| | LC_L21I_ | | GTPARFSGSLLGGKAALTLSGVQPEDEAEYYCALWYSNRWVFGSGTKLTVL |
| | Q46R_G141S- | | |
| | VL | | |
| 444 | E1L_HC_Q46E_ | artificial | EVQLVESGGGLVQPGGSLKLSCAASGFTFNKYAMNWVREAPGKGLEWVARIRSKYNNY |
| | LC_Q46K- | | ATYYADSVKSRFTISRDDSKNTAYLQMNNLKTEDTAVYYCVRHGNFGNSYTSYYAYWG |
| | VH | | QGTLVTVSS |
| 445 | E1L_HC_Q46E_ | artificial | QTVVTQEPSLTVSPGGTVTLTCGSSTGAVTSGYYPNWVQKKPGQAPRGLIGGTKFLAP |
| | LC_Q46K- | | GTPARFSGSLLGGKAALTLSGVQPEDEAEYYCALWYSNRWVFGGGTKLTVL |
| | VL | | |
| 446 | E1L_HC_Q46E_ | artificial | EVQLVESGGGLVQPGGSLKLSCAASGFTFNKYAMNWVREAPGKGLEWVARIRSKYNNY |
| | LC_Q46K_ | | ATYYADSVKSRFTISRDDSKNTAYLQMNNLKTEDTAVYYCVRHGNFGNSYTSYYAYWG |
| | G141S-VH | | QGTLVTVSS |
| 447 | E1L_HC_Q46E_ | artificial | QTVVTQEPSLTVSPGGTVTLTCGSSTGAVTSGYYPNWVQKKPGQAPRGLIGGTKFLAP |
| | LC_Q46K_ | | GTPARFSGSLLGGKAALTLSGVQPEDEAEYYCALWYSNRWVFGSGTKLTVL |
| | G141S-VL | | |
| 448 | E1L_HC_Q46E_ | artificial | EVQLVESGGGLVQPGGSLKLSCAASGFTFNKYAMNWVREAPGKGLEWVARIRSKYNNY |
| | LC_Q46R- | | ATYYADSVKSRFTISRDDSKNTAYLQMNNLKTEDTAVYYCVRHGNFGNSYTSYYAYWG |
| | VH | | QGTLVTVSS |
| 449 | E1L_HC_Q46E_ | artificial | QTVVTQEPSLTVSPGGTVTLTCGSSTGAVTSGYYPNWVQRKPGQAPRGLIGGTKFLAP |
| | LC_Q46R- | | GTPARFSGSLLGGKAALTLSGVQPEDEAEYYCALWYSNRWVFGGGTKLTVL |
| | VL | | |
| 450 | E1L_HC_Q46E_ | artificial | EVQLVESGGGLVQPGGSLKLSCAASGFTFNKYAMNWVREAPGKGLEWVARIRSKYNNY |
| | LC_Q46R_ | | ATYYADSVKSRFTISRDDSKNTAYLQMNNLKTEDTAVYYCVRHGNFGNSYTSYYAYWG |
| | G141S-VH | | QGTLVTVSS |
| 451 | E1L_HC_Q46E_ | artificial | QTVVTQEPSLTVSPGGTVTLTCGSSTGAVTSGYYPNWVQRKPGQAPRGLIGGTKFLAP |
| | LC_Q46R_ | | GTPARFSGSLLGGKAALTLSGVQPEDEAEYYCALWYSNRWVFGSGTKLTVL |
| | G141S-VL | | |
| 452 | E1L_HC_Q46K | artificial | EVQLVESGGGLVQPGGSLKLSCAASGFTENKYAMNWVRKAPGKGLEWVARIRSKYNNY |
| | -VH | | ATYYADSVKSRFTISRDDSKNTAYLQMNNLKTEDTAVYYCVRHGNFGNSYTSYYAYWG |
| | | | QGTLVTVSS |
| 453 | E1L_HC_Q46K | artificial | QTVVTQEPSLTVSPGGTVTLTCGSSTGAVTSGYYPNWVQQKPGQAPRGLIGGTKFLAP |
| | -VL | | GTPARFSGSLLGGKAALTLSGVQPEDEAEYYCALWYSNRWVFGGGTKLTVL |
| 454 | E1L_HC_Q46R | artificial | EVQLVESGGGLVQPGGSLKLSCAASGFTFNKYAMNWVRRAPGKGLEWVARIRSKYNNY |
| | -VH | | ATYYADSVKSRFTISRDDSKNTAYLQMNNLKTEDTAVYYCVRHGNFGNSYTSYYAYWG |
| | | | QGTLVTVSS |
| 455 | E1L_HC_Q46R | artificial | QTVVTQEPSLTVSPGGTVTLTCGSSTGAVTSGYYPNWVQQKPGQAPRGLIGGTKFLAP |
| | -VL | | GTPARFSGSLLGGKAALTLSGVQPEDEAEYYCALWYSNRWVFGGGTKLTVL |
| 456 | E1L_HC_V107A- | artificial | EVQLVESGGGLVQPGGSLKLSCAASGFTFNKYAMNWVRQAPGKGLEWVARIRSKYNNY |
| | VH | | ATYYADSVKSRFTISRDDSKNTAYLQMNNLKTEDTAVYYCARHGNFGNSYTSYYAYWG |
| | | | QGTLVTVSS |
| 457 | E1L_HC_V107A- | artificial | QTVVTQEPSLTVSPGGTVTLTCGSSTGAVTSGYYPNWVQQKPGQAPRGLIGGTKFLAP |
| | VL | | GTPARFSGSLLGGKAALTLSGVQPEDEAEYYCALWYSNRWVFGGGTKLTVL |
| 458 | E1L_HC_V107L- | artificial | EVQLVESGGGLVQPGGSLKLSCAASGFTFNKYAMNWVRQAPGKGLEWVARIRSKYNNY |
| | VH | | ATYYADSVKSRFTISRDDSKNTAYLQMNNLKTEDTAVYYCLRHGNFGNSYTSYYAYWG |
| | | | QGTLVTVSS |
| 459 | E1L_HC_V107L- | artificial | QTVVTQEPSLTVSPGGTVTLTCGSSTGAVTSGYYPNWVQQKPGQAPRGLIGGTKFLAP |
| | VL | | GTPARFSGSLLGGKAALTLSGVQPEDEAEYYCALWYSNRWVFGGGTKLTVL |
| 460 | E1L_HC_Y136F- | artificial | KYAMN |
| | HCDR1 | | |
| 461 | E1L_HC_Y136F- | artificial | RIRSKYNNYATYYADSVKS |
| | HCDR2 | | |
| 462 | E1L_HC_Y136F- | artificial | HGNFGNSYTSYFAY |
| | HCDR3 | | |
| 463 | E1L_HC_Y136F- | artificial | GSSTGAVTSGYYPN |
| | LCDR1 | | |
| 464 | E1L_HC_Y136F- | artificial | GTKFLAP |
| | LCDR2 | | |
| 465 | E1L_HC_Y136F- | artificial | ALWYSNRWV |
| | LCDR3 | | |
| 466 | E1L_HC_Y136F- | artificial | EVQLVESGGGLVQPGGSLKLSCAASGFTFNKYAMNWVRQAPGKGLEWVARIRSKYNNY |
| | VH | | ATYYADSVKSRFTISRDDSKNTAYLQMNNLKTEDTAVYYCVRHGNFGNSYTSYFAYWG |
| | | | QGTLVTVSS |
| 467 | E1L_HC_Y136F- | artificial | QTVVTQEPSLTVSPGGTVTLTCGSSTGAVTSGYYPNWVQQKPGQAPRGLIGGTKFLAP |
| | VL | | GTPARFSGSLLGGKAALTLSGVQPEDEAEYYCALWYSNRWVFGGGTKLTVL |
| 468 | E1L_HC_Y136F_ | artificial | EVQLVESGGGLVQPGGSLKLSCAASGFTFNKYAMNWVRQAPGKGLEWVARIRSKYNNY |
| | LC_V44I- | | ATYYADSVKSRFTISRDDSKNTAYLQMNNLKTEDTAVYYCVRHGNFGNSYTSYFAYWG |
| | VH | | QGTLVTVSS |
| 469 | E1L_HC_Y136F_ | artificial | QTVVTQEPSLTVSPGGTVTLTCGSSTGAVTSGYYPNWIQQKPGQAPRGLIGGTKFLAP |
| | LC_V44I- | | GTPARFSGSLLGGKAALTLSGVQPEDEAEYYCALWYSNRWVFGGGTKLTVL |
| | VL | | |
| 470 | E1L_HC_Y136F_ | artificial | EVQLVESGGGLVQPGGSLKLSCAASGFTFNKYAMNWVRQAPGKGLEWVARIRSKYNNY |
| | LC_V44L- | | ATYYADSVKSRFTISRDDSKNTAYLQMNNLKTEDTAVYYCVRHGNFGNSYTSYFAYWG |
| | VH | | QGTLVTVSS |
| 471 | E1L_HC_Y136F_ | artificial | QTVVTQEPSLTVSPGGTVTLTCGSSTGAVTSGYYPNWLQQKPGQAPRGLIGGTKFLAP |
| | LC_V44L- | | GTPARFSGSLLGGKAALTLSGVQPEDEAEYYCALWYSNRWVFGGGTKLTVL |
| | VL | | |
| 472 | E1L_I2E- | artificial | KYAIN |
| | HCDR1 | | |
| 473 | E1L_I2E- | artificial | RIRSKYNNYATYYADAVKS |
| | HCDR2 | | |
| 474 | E1L_I2E- | artificial | AGNFGSSYTSYYAY |
| | HCDR3 | | |
| 475 | E1L_I2E- | artificial | GSSTGAVTSGYYPN |
| | LCDR1 | | |
| 476 | E1L_I2E- | artificial | GTKFLAP |
| | LCDR2 | | |
| 477 | E1L_I2E- | artificial | ALWYSNRWV |
| | LCDR3 | | |
| 478 | E1L_I2E- | artificial | EVQLVESGGGLVQPGGSLKLSCAASGFTFNKYAINWVRQAPGKGLEWVARIRSKYNNY |
| | VH | | ATYYADAVKSRFTISRDDSKNTVYLQMNNLKTEDTAVYYCARAGNFGSSYTSYYAYWG |
| | | | QGTLVTVSS |
| 479 | E1L_I2E- | artificial | QTVVTQEPSLTVSPGGTVTITCGSSTGAVTSGYYPNWVQKKPGQAPRGLIGGTKFLAP |
| | VL | | GTPARFSGSLSGGKAALTLSGVQPEDEAEYYCALWYSNRWVFGSGTKLTVL |
| 480 | E1L_I2K- | artificial | KYAMN |
| | HCDR1 | | |
| 481 | E1L_I2K- | artificial | RIRSKYNNYATYYAEAVKG |
| | HCDR2 | | |
| 482 | E1L_I2K- | artificial | NENIGTSYTSYYAY |
| | HCDR3 | | |
| 483 | E1L_I2K- | artificial | GSSTGAVTSGYYPN |
| | LCDR1 | | |
| 484 | E1L_I2K- | artificial | GTKFLAP |
| | LCDR2 | | |
| 485 | E1L_I2K- | artificial | ALWYSNRWV |
| | LCDR3 | | |
| 486 | E1L_I2K- | artificial | EVQLVESGGGLVQPGGSLKLSCAASGFTFNKYAMNWVRQAPGKGLEWVARIRSKYNNY |
| | VH | | ATYYAEAVKGRFTISRDDSKNTVYLQMNNLKTEDTAVYYCVRNENIGTSYTSYYAYWG |
| | | | QGTLVTVSS |
| 487 | E1L_I2K- | artificial | QTVVTQEPSLTVSPGGTVTITCGSSTGAVTSGYYPNWVQQKPGQAPRGLIGGTKFLAP |
| | VL | | GTPARFSGSLSGGKAALTLSGVQPEDEAEYYCALWYSNRWVFGSGTKLTVL |
| 488 | E1L_I2L- | artificial | KYAMN |
| | HCDR1 | | |
| 489 | E1L_I2L- | artificial | RIRSKYNNYATYYADAVKS |
| | HCDR2 | | |
| 490 | E1L_I2L- | artificial | AGNFGSSYTSYFAY |
| | HCDR3 | | |
| 491 | E1L_I2L- | artificial | GSSTGAVTSGYYPN |
| | LCDR1 | | |
| 492 | E1L_I2L- | artificial | GTKFLAP |
| | LCDR2 | | |
| 493 | E1L_I2L- | artificial | ALYYSNRWV |
| | LCDR3 | | |
| 494 | E1L_I2L- | artificial | EVQLVESGGGLVQPGGSLKLSCAASGFTENKYAMNWVRQAPGKGMEWVARIRSKYNNY |
| | VH | | ATYYADAVKSRFTISRDDSKNTLYLQMNNLKTEDTAVYYCVRAGNFGSSYTSYFAYWG |
| | | | QGTLVTVSS |
| 495 | E1L_I2L- | artificial | QTVVTQEPSLTVSPGGTVTITCGSSTGAVTSGYYPNWIQKKPGQAPRGLIGGTKFLAP |
| | VL | | GTPARFSGSLEGGKAALTLSGVQPEDEAEYYCALYYSNRWVFGSGTKLTVL |
| 496 | E1L_I2M- | artificial | KYAMN |
| | HCDR1 | | |
| 497 | E1L_I2M- | artificial | RIRSKYNNYATYYADAVKS |
| | HCDR2 | | |
| 498 | E1L_I2M- | artificial | AGNFGTSYTSYYAY |
| | HCDR3 | | |
| 499 | E1L_I2M- | artificial | GSSTGAVTSGYYPN |
| | LCDR1 | | |
| 500 | E1L_I2M- | artificial | GTKFLAP |
| | LCDR2 | | |
| 501 | E1L_I2M- | artificial | ALWYSNRWV |
| | LCDR3 | | |
| 502 | E1L_I2M- | artificial | EVQLVESGGGLVQPGGSLKLSCAASGFTFNKYAMNWVRQAPGKGMEWVARIRSKYNNY |
| | VH | | ATYYADAVKSRFTISRDDSKNTLYLQMNNLKTEDTAVYYCVRAGNFGTSYTSYYAYWG |
| | | | QGTLVTVSS |
| 503 | E1L_I2M- | artificial | QTVVTQEPSLTVSPGGTVTITCGSSTGAVTSGYYPNWVQKKPGQAPRGLIGGTKFLAP |
| | VL | | GTPARFSGSLSGGKAALTLSGVQPEDEAEYYCALWYSNRWVFGSGTKLTVL |
| 504 | E1L_I2M2- | artificial | KYAIN |
| | HCDR1 | | |
| 505 | E1L_I2M2- | artificial | RIRSKYNNYATYYADAVKS |
| | HCDR2 | | |
| 506 | E1L_I2M2- | artificial | NANFGTSYTSYFAY |
| | HCDR3 | | |
| 507 | E1L_I2M2- | artificial | GSSTGAVTSGYYPN |
| | LCDR1 | | |
| 508 | E1L_I2M2- | artificial | GTKFLAP |
| | LCDR2 | | |
| 509 | E1L_I2M2- | artificial | ALWYSNRWV |
| | LCDR3 | | |
| 510 | E1L_I2M2- | artificial | EVQLVESGGGLVQPGGSLKLSCAASGFTENKYAINWVREAPGKGLEWVARIRSKYNNY |
| | VH | | ATYYADAVKSRFTISRDDSKNTAYLQMNNLKTEDTAVYYCVRNANFGTSYTSYFAYWG |
| | | | QGTLVTVSS |
| 511 | E1L_I2M2- | artificial | QTVVTQEPSLTVSPGGTVTLTCGSSTGAVTSGYYPNWVQKKPGQAPRGLIGGTKFLAP |
| | VL | | GTPARFSGSLLGGKAALTLSGVQPEDEAEYYCALWYSNRWVFGSGTKLTVL |
| 512 | E1L_LC_G141S- | artificial | EVQLVESGGGLVQPGGSLKLSCAASGFTFNKYAMNWVRQAPGKGLEWVARIRSKYNNY |
| | VH | | ATYYADSVKSRFTISRDDSKNTAYLQMNNLKTEDTAVYYCVRHGNFGNSYTSYYAYWG |
| | | | QGTLVTVSS |
| 513 | E1L_LC_G141S- | artificial | QTVVTQEPSLTVSPGGTVTLTCGSSTGAVTSGYYPNWVQQKPGQAPRGLIGGTKFLAP |
| | VL | | GTPARFSGSLLGGKAALTLSGVQPEDEAEYYCALWYSNRWVFGSGTKLTVL |
| 514 | E1L_LC_G141S_ | artificial | EVQLVESGGGLVQPGGSLKLSCAASGFTFNKYAMNWVRQAPGKGLEWVARIRSKYNNY |
| | L21I-VH | | ATYYADSVKSRFTISRDDSKNTAYLQMNNLKTEDTAVYYCVRHGNFGNSYTSYYAYWG |
| | | | QGTLVTVSS |
| 515 | E1L_LC_G141S_ | artificial | QTVVTQEPSLTVSPGGTVTITCGSSTGAVTSGYYPNWVQQKPGQAPRGLIGGTKFLAP |
| | L21I-VL | | GTPARFSGSLLGGKAALTLSGVQPEDEAEYYCALWYSNRWVFGSGTKLTVL |
| 516 | E1L_LC_L83E | artificial | EVQLVESGGGLVQPGGSLKLSCAASGFTFNKYAMNWVRQAPGKGLEWVARIRSKYNNY |
| | -VH | | ATYYADSVKSRFTISRDDSKNTAYLQMNNLKTEDTAVYYCVRHGNFGNSYTSYYAYWG |
| | | | QGTLVTVSS |
| 517 | E1L_LC_L83E | artificial | QTVVTQEPSLTVSPGGTVTLTCGSSTGAVTSGYYPNWVQQKPGQAPRGLIGGTKFLAP |
| | -VL | | GTPARFSGSLEGGKAALTLSGVQPEDEAEYYCALWYSNRWVFGGGTKLTVL |
| 518 | E1L_LC_L83S | artificial | EVQLVESGGGLVQPGGSLKLSCAASGFTFNKYAMNWVRQAPGKGLEWVARIRSKYNNY |
| | -VH | | ATYYADSVKSRFTISRDDSKNTAYLQMNNLKTEDTAVYYCVRHGNFGNSYTSYYAYWG |
| | | | QGTLVTVSS |
| 519 | E1L_LC_L83S | artificial | QTVVTQEPSLTVSPGGTVTLTCGSSTGAVTSGYYPNWVQQKPGQAPRGLIGGTKFLAP |
| | -VL | | GTPARFSGSLSGGKAALTLSGVQPEDEAEYYCALWYSNRWVFGGGTKLTVL |
| 520 | E1L_LC_Q46E | artificial | EVQLVESGGGLVQPGGSLKLSCAASGFTFNKYAMNWVRQAPGKGLEWVARIRSKYNNY |
| | -VH | | ATYYADSVKSRFTISRDDSKNTAYLQMNNLKTEDTAVYYCVRHGNFGNSYTSYYAYWG |
| | | | QGTLVTVSS |
| 521 | E1L_LC_Q46E | artificial | QTVVTQEPSLTVSPGGTVTLTCGSSTGAVTSGYYPNWVQEKPGQAPRGLIGGTKFLAP |
| | -VL | | GTPARFSGSLLGGKAALTLSGVQPEDEAEYYCALWYSNRWVFGGGTKLTVL |
| 522 | E1L_LC_Q46K | artificial | EVQLVESGGGLVQPGGSLKLSCAASGFTFNKYAMNWVRQAPGKGLEWVARIRSKYNNY |
| | -VH | | ATYYADSVKSRFTISRDDSKNTAYLQMNNLKTEDTAVYYCVRHGNFGNSYTSYYAYWG |
| | | | QGTLVTVSS |
| 523 | E1L_LC_Q46K | artificial | QTVVTQEPSLTVSPGGTVTLTCGSSTGAVTSGYYPNWVQKKPGQAPRGLIGGTKFLAP |
| | -VL | | GTPARFSGSLLGGKAALTLSGVQPEDEAEYYCALWYSNRWVFGGGTKLTVL |
| 524 | E1L_LC_A107L- | artificial | KYAMN |
| | HCDR1 | | |
| 525 | E1L_LC_A107L- | artificial | RIRSKYNNYATYYADSVKS |
| | HCDR2 | | |
| 526 | E1L_LC_A107L- | artificial | HGNFGNSYTSYYAY |
| | HCDR3 | | |
| 527 | E1L_LC_A107L- | artificial | GSSTGAVTSGYYPN |
| | LCDR1 | | |
| 528 | E1L_LC_A107L- | artificial | GTKFLAP |
| | LCDR2 | | |
| 529 | E1L_LC_A107L- | artificial | LLWYSNRWV |
| | LCDR3 | | |
| 530 | E1L_LC_A107L- | artificial | EVQLVESGGGLVQPGGSLKLSCAASGFTFNKYAMNWVRQAPGKGLEWVARIRSKYNNY |
| | VH | | ATYYADSVKSRFTISRDDSKNTAYLQMNNLKTEDTAVYYCVRHGNFGNSYTSYYAYWG |
| | | | QGTLVTVSS |
| 531 | E1L_LC_A107L- | artificial | QTVVTQEPSLTVSPGGTVTLTCGSSTGAVTSGYYPNWVQQKPGQAPRGLIGGTKFLAP |
| | VL | | GTPARFSGSLLGGKAALTLSGVQPEDEAEYYCLLWYSNRWVFGGGTKLTVL |
| 532 | E1L_LC_V44I | artificial | EVQLVESGGGLVQPGGSLKLSCAASGFTFNKYAMNWVRQAPGKGLEWVARIRSKYNNY |
| | -VH | | ATYYADSVKSRFTISRDDSKNTAYLQMNNLKTEDTAVYYCVRHGNFGNSYTSYYAYWG |
| | | | QGTLVTVSS |
| 533 | E1L_LC_V44I | artificial | QTVVTQEPSLTVSPGGTVTLTCGSSTGAVTSGYYPNWIQQKPGQAPRGLIGGTKFLAP |
| | -VL | | GTPARFSGSLLGGKAALTLSGVQPEDEAEYYCALWYSNRWVFGGGTKLTVL |
| 534 | E1L_LC_V44L | artificial | EVQLVESGGGLVQPGGSLKLSCAASGFTFNKYAMNWVRQAPGKGLEWVARIRSKYNNY |
| | -VH | | ATYYADSVKSRFTISRDDSKNTAYLQMNNLKTEDTAVYYCVRHGNFGNSYTSYYAYWG |
| | | | QGTLVTVSS |
| 535 | E1L_LC_V44L | artificial | QTVVTQEPSLTVSPGGTVTLTCGSSTGAVTSGYYPNWLQQKPGQAPRGLIGGTKFLAP |
| | -VL | | GTPARFSGSLLGGKAALTLSGVQPEDEAEYYCALWYSNRWVFGGGTKLTVL |
| 536 | E1L_LC_V44M | artificial | EVQLVESGGGLVQPGGSLKLSCAASGFTFNKYAMNWVRQAPGKGLEWVARIRSKYNNY |
| | -VH | | ATYYADSVKSRFTISRDDSKNTAYLQMNNLKTEDTAVYYCVRHGNFGNSYTSYYAYWG |
| | | | QGTLVTVSS |
| 537 | E1L_LC_V44M | artificial | QTVVTQEPSLTVSPGGTVTLTCGSSTGAVTSGYYPNWMQQKPGQAPRGLIGGTKFLAP |
| | -VL | | GTPARFSGSLLGGKAALTLSGVQPEDEAEYYCALWYSNRWVFGGGTKLTVL |
| 538 | E1L_LC_W109Y- | artificial | KYAMN |
| | HCDR1 | | |
| 539 | E1L_LC_W109Y- | artificial | RIRSKYNNYATYYADSVKS |
| | HCDR2 | | |
| 540 | E1L_LC_W109Y- | artificial | HGNFGNSYTSYYAY |
| | HCDR3 | | |
| 541 | E1L_LC_W109Y- | artificial | GSSTGAVTSGYYPN |
| | LCDR1 | | |
| 542 | E1L_LC_W109Y- | artificial | GTKFLAP |
| | LCDR2 | | |
| 543 | E1L_LC_W109Y- | artificial | ALYYSNRWV |
| | LCDR3 | | |
| 544 | E1L_LC_W109Y- | artificial | EVQLVESGGGLVQPGGSLKLSCAASGFTFNKYAMNWVRQAPGKGLEWVARIRSKYNNY |
| | VH | | ATYYADSVKSRFTISRDDSKNTAYLQMNNLKTEDTAVYYCVRHGNFGNSYTSYYAYWG |
| | | | QGTLVTVSS |
| 545 | E1L_LC_W109Y- | artificial | QTVVTQEPSLTVSPGGTVTLTCGSSTGAVTSGYYPNWVQQKPGQAPRGLIGGTKFLAP |
| | VL | | GTPARFSGSLLGGKAALTLSGVQPEDEAEYYCALYYSNRWVFGGGTKLTVL |
| 546 | E2M-HCDR1 | artificial | GYAMN |
| 547 | E2M-HCDR2 | artificial | RIRSKYNNYATYYADSVKE |
| 548 | E2M-HCDR3 | artificial | HRNFGNSYLSWFAY |
| 549 | E2M-LCDR1 | artificial | RSSTGAVTSGYYPN |
| 550 | E2M-LCDR2 | artificial | ATDMRPS |
| 551 | E2M-LCDR3 | artificial | ALWYSNRWV |
| 552 | E2M-VH | artificial | EVQLVESGGGLVQPGGSLKLSCAASGFTFNGYAMNWVRQAPGKGLEWVARIRSKYNNY |
| | | | ATYYADSVKERFTISRDDSKNTAYLQMNNLKTEDTAVYYCVRHRNFGNSYLSWFAYWG |
| | | | QGTLVTVSS |
| 553 | E2M-VL | artificial | QTVVTQEPSLTVSPGGTVTLTCRSSTGAVTSGYYPNWVQQKPGQAPRGLIGATDMRPS |
| | | | GTPARFSGSLLGGKAALTLSGVQPEDEAEYYCALWYSNRWVFGGGTKLTVL |
| 554 | E2M_HC_A89I | artificial | EVQLVESGGGLVQPGGSLKLSCAASGFTFNGYAMNWVRQAPGKGLEWVARIRSKYNNY |
| | -VH | | ATYYADSVKERFTISRDDSKNTIYLQMNNLKTEDTAVYYCVRHRNFGNSYLSWFAYWG |
| | | | QGTLVTVSS |
| 555 | E2M_HC_A89I | artificial | QTVVTQEPSLTVSPGGTVTLTCRSSTGAVTSGYYPNWVQQKPGQAPRGLIGATDMRPS |
| | -VL | | GTPARFSGSLLGGKAALTLSGVQPEDEAEYYCALWYSNRWVFGGGTKLTVL |
| 556 | E2M_HC_A89L | artificial | EVQLVESGGGLVQPGGSLKLSCAASGFTFNGYAMNWVRQAPGKGLEWVARIRSKYNNY |
| | -VH | | ATYYADSVKERFTISRDDSKNTLYLQMNNLKTEDTAVYYCVRHRNFGNSYLSWFAYWG |
| | | | QGTLVTVSS |
| 557 | E2M_HC_A89L- | artificial | QTVVTQEPSLTVSPGGTVTLTCRSSTGAVTSGYYPNWVQQKPGQAPRGLIGATDMRPS |
| | VL | | GTPARFSGSLLGGKAALTLSGVQPEDEAEYYCALWYSNRWVFGGGTKLTVL |
| 558 | E2M_HC_A89T | artificial | EVQLVESGGGLVQPGGSLKLSCAASGFTFNGYAMNWVRQAPGKGLEWVARIRSKYNNY |
| | -VH | | ATYYADSVKERFTISRDDSKNTTYLQMNNLKTEDTAVYYCVRHRNFGNSYLSWFAYWG |
| | | | QGTLVTVSS |
| 559 | E2M_HC_A89T | artificial | QTVVTQEPSLTVSPGGTVTLTCRSSTGAVTSGYYPNWVQQKPGQAPRGLIGATDMRPS |
| | -VL | | GTPARFSGSLLGGKAALTLSGVQPEDEAEYYCALWYSNRWVFGGGTKLTVL |
| 560 | E2M_HC_A89V | artificial | EVQLVESGGGLVQPGGSLKLSCAASGFTFNGYAMNWVRQAPGKGLEWVARIRSKYNNY |
| | -VH | | ATYYADSVKERFTISRDDSKNTVYLQMNNLKTEDTAVYYCVRHRNFGNSYLSWFAYWG |
| | | | QGTLVTVSS |
| 561 | E2M_HC_A89V | artificial | QTVVTQEPSLTVSPGGTVTLTCRSSTGAVTSGYYPNWVQQKPGQAPRGLIGATDMRPS |
| | -VL | | GTPARFSGSLLGGKAALTLSGVQPEDEAEYYCALWYSNRWVFGGGTKLTVL |
| 562 | E2M_HC_L52M | artificial | EVQLVESGGGLVQPGGSLKLSCAASGFTFNGYAMNWVRQAPGKGMEWVARIRSKYNNY |
| | -VH | | ATYYADSVKERFTISRDDSKNTAYLQMNNLKTEDTAVYYCVRHRNFGNSYLSWFAYWG |
| | | | QGTLVTVSS |
| 563 | E2M_HC_L52M | artificial | QTVVTQEPSLTVSPGGTVTLTCRSSTGAVTSGYYPNWVQQKPGQAPRGLIGATDMRPS |
| | -VL | | GTPARFSGSLLGGKAALTLSGVQPEDEAEYYCALWYSNRWVFGGGTKLTVL |
| 564 | E2M_HC_L52M_ | artificial | EVQLVESGGGLVQPGGSLKLSCAASGFTFNGYAMNWVRQAPGKGMEWVARIRSKYNNY |
| | LC_L21I_ | | ATYYADSVKERFTISRDDSKNTAYLQMNNLKTEDTAVYYCVRHRNFGNSYLSWFAYWG |
| | Q46K_G141S- | | QGTLVTVSS |
| | VH | | |
| 565 | E2M_HC_L52M_ | artificial | QTVVTQEPSLTVSPGGTVTITCRSSTGAVTSGYYPNWVQKKPGQAPRGLIGATDMRPS |
| | LC_L21I_ | | GTPARFSGSLLGGKAALTLSGVQPEDEAEYYCALWYSNRWVFGSGTKLTVL |
| | 6Q4K_G141S- | | |
| | VL | | |
| 566 | E2M_HC_L52M_ | artificial | EVQLVESGGGLVQPGGSLKLSCAASGFTFNGYAMNWVRQAPGKGMEWVARIRSKYNNY |
| | LC_Q46K- | | ATYYADSVKERFTISRDDSKNTAYLQMNNLKTEDTAVYYCVRHRNFGNSYLSWFAYWG |
| | VH | | QGTLVTVSS |
| 567 | E2M_HC_L52M_ | artificial | QTVVTQEPSLTVSPGGTVTLTCRSSTGAVTSGYYPNWVQKKPGQAPRGLIGATDMRPS |
| | LC_Q46K- | | GTPARFSGSLLGGKAALTLSGVQPEDEAEYYCALWYSNRWVFGGGTKLTVL |
| | VL | | |
| 568 | E2M_HC_L52M_ | artificial | EVQLVESGGGLVQPGGSLKLSCAASGFTFNGYAMNWVRQAPGKGMEWVARIRSKYNNY |
| | LC_Q46K_ | | ATYYADSVKERFTISRDDSKNTAYLQMNNLKTEDTAVYYCVRHRNFGNSYLSWFAYWG |
| | G141S-VH | | QGTLVTVSS |
| 569 | E2M_HC_L52M_ | artificial | QTVVTQEPSLTVSPGGTVTLTCRSSTGAVTSGYYPNWVQKKPGQAPRGLIGATDMRPS |
| | LC_Q46K_ | | GTPARFSGSLLGGKAALTLSGVQPEDEAEYYCALWYSNRWVFGSGTKLTVL |
| | G141S-VL | | |
| 570 | E2M_HC_L52V | artificial | EVQLVESGGGLVQPGGSLKLSCAASGFTFNGYAMNWVRQAPGKGVEWVARIRSKYNNY |
| | -VH | | ATYYADSVKERFTISRDDSKNTAYLQMNNLKTEDTAVYYCVRHRNFGNSYLSWFAYWG |
| | | | QGTLVTVSS |
| 571 | E2M_HC_L52V | artificial | QTVVTQEPSLTVSPGGTVTLTCRSSTGAVTSGYYPNWVQQKPGQAPRGLIGATDMRPS |
| | -VL | | GTPARFSGSLLGGKAALTLSGVQPEDEAEYYCALWYSNRWVFGGGTKLTVL |
| 572 | E2M_HC_L52V_ | artificial | EVQLVESGGGLVQPGGSLKLSCAASGFTFNGYAMNWVRQAPGKGVEWVARIRSKYNNY |
| | LC_V44F- | | ATYYADSVKERFTISRDDSKNTAYLQMNNLKTEDTAVYYCVRHRNFGNSYLSWFAYWG |
| | VH | | QGTLVTVSS |
| 573 | E2M_HC_L52V_ | artificial | QTVVTQEPSLTVSPGGTVTLTCRSSTGAVTSGYYPNWFQQKPGQAPRGLIGATDMRPS |
| | LC_V44F- | | GTPARFSGSLLGGKAALTLSGVQPEDEAEYYCALWYSNRWVFGGGTKLTVL |
| | VL | | |
| 574 | E2M_HC_L52V_ | artificial | EVQLVESGGGLVQPGGSLKLSCAASGFTFNGYAMNWVRQAPGKGVEWVARIRSKYNNY |
| | LC_V44Y- | | ATYYADSVKERFTISRDDSKNTAYLQMNNLKTEDTAVYYCVRHRNFGNSYLSWFAYWG |
| | VH | | QGTLVTVSS |
| 575 | E2M_HC_L52V_ | artificial | QTVVTQEPSLTVSPGGTVTLTCRSSTGAVTSGYYPNWYQQKPGQAPRGLIGATDMRPS |
| | LC_V44Y- | | GTPARFSGSLLGGKAALTLSGVQPEDEAEYYCALWYSNRWVFGGGTKLTVL |
| | VL | | |
| 576 | E2M_HC_M41F_ | artificial | GYAFN |
| | A89V- | | |
| | HCDR1 | | |
| 577 | E2M_HC_M41F_ | artificial | RIRSKYNNYATYYADSVKE |
| | A89V- | | |
| | HCDR2 | | |
| 578 | E2M_HC_M41F_ | artificial | HRNFGNSYLSWFAY |
| | A89V-HCDR3 | | |
| 579 | E2M_HC_M41F_ | artificial | RSSTGAVTSGYYPN |
| | A89V-LCDR1 | | |
| 580 | E2M_HC_M41F_ | artificial | ATDMRPS |
| | A89V-LCDR2 | | |
| 581 | E2M_HC_M41F_ | artificial | ALWYSNRWV |
| | A89V- | | |
| | LCDR3 | | |
| 582 | E2M_HC_M41F_ | artificial | EVQLVESGGGLVQPGGSLKLSCAASGFTFNGYAFNWVRQAPGKGLEWVARIRSKYNNY |
| | A89V-VH | | ATYYADSVKERFTISRDDSKNTVYLQMNNLKTEDTAVYYCVRHRNFGNSYLSWFAYWG |
| | | | QGTLVTVSS |
| 583 | E2M_HC_M41F_ | artificial | QTVVTQEPSLTVSPGGTVTLTCRSSTGAVTSGYYPNWVQQKPGQAPRGLIGATDMRPS |
| | A89V-VL | | GTPARFSGSLLGGKAALTLSGVQPEDEAEYYCALWYSNRWVFGGGTKLTVL |
| 584 | E2M_HC_M41I | artificial | GYAIN |
| | -HCDR1 | | |
| 585 | E2M_HC_M41I | artificial | RIRSKYNNYATYYADSVKE |
| | -HCDR2 | | |
| 586 | E2M_HC_M41I | artificial | HRNFGNSYLSWFAY |
| | -HCDR3 | | |
| 587 | E2M_HC_M41I | artificial | RSSTGAVTSGYYPN |
| | -LCDR1 | | |
| 588 | E2M_HC_M41I | artificial | ATDMRPS |
| | -LCDR2 | | |
| 589 | E2M_HC_M41I | artificial | ALWYSNRWV |
| | -LCDR3 | | |
| 590 | E2M_HC_M41I | artificial | EVQLVESGGGLVQPGGSLKLSCAASGFTFNGYAINWVRQAPGKGLEWVARIRSKYNNY |
| | -VH | | ATYYADSVKERFTISRDDSKNTAYLQMNNLKTEDTAVYYCVRHRNFGNSYLSWFAYWG |
| | | | QGTLVTVSS |
| 591 | E2M_HC_M41I | artificial | QTVVTQEPSLTVSPGGTVTLTCRSSTGAVTSGYYPNWVQQKPGQAPRGLIGATDMRPS |
| | -VL | | GTPARFSGSLLGGKAALTLSGVQPEDEAEYYCALWYSNRWVFGGGTKLTVL |
| 592 | E2M_HC_M41I_ | artificial | EVQLVESGGGLVQPGGSLKLSCAASGFTFNGYAINWVRQAPGKGLEWVARIRSKYNNY |
| | A89L-VH | | ATYYADSVKERFTISRDDSKNTLYLQMNNLKTEDTAVYYCVRHRNFGNSYLSWFAYWG |
| | | | QGTLVTVSS |
| 593 | E2M_HC_M41I_ | artificial | QTVVTQEPSLTVSPGGTVTLTCRSSTGAVTSGYYPNWVQQKPGQAPRGLIGATDMRPS |
| | A89L-VL | | GTPARFSGSLLGGKAALTLSGVQPEDEAEYYCALWYSNRWVFGGGTKLTVL |
| 594 | E2M_HC_M41I_ | artificial | EVQLVESGGGLVQPGGSLKLSCAASGFTENGYAINWVRQAPGKGLEWVARIRSKYNNY |
| | A89V-VH | | ATYYADSVKERFTISRDDSKNTVYLQMNNLKTEDTAVYYCVRHRNFGNSYLSWFAYWG |
| | | | QGTLVTVSS |
| 595 | E2M_HC_M41I_ | artificial | QTVVTQEPSLTVSPGGTVTLTCRSSTGAVTSGYYPNWVQQKPGQAPRGLIGATDMRPS |
| | A89V-VL | | GTPARFSGSLLGGKAALTLSGVQPEDEAEYYCALWYSNRWVFGGGTKLTVL |
| 596 | E2M_HC_M41I_ | artificial | EVQLVESGGGLVQPGGSLKLSCAASGFTFNGYAINWVRQAPGKGLEWVARIRSKYNNY |
| | A89V_LC_ | | ATYYADSVKERFTISRDDSKNTVYLQMNNLKTEDTAVYYCVRHRNFGNSYLSWFAYWG |
| | L21I_Q46K_ | | QGTLVTVSS |
| | 1G14S-VH | | |
| 597 | E2M_HC_M41I_ | artificial | QTVVTQEPSLTVSPGGTVTITCRSSTGAVTSGYYPNWVQKKPGQAPRGLIGATDMRPS |
| | A89V_LC_ | | GTPARFSGSLLGGKAALTLSGVQPEDEAEYYCALWYSNRWVFGSGTKLTVL |
| | L21I_Q46K_ | | |
| | G141S-VL | | |
| 598 | E2M_HC_M41I_ | artificial | EVQLVESGGGLVQPGGSLKLSCAASGFTFNGYAINWVRQAPGKGLEWVARIRSKYNNY |
| | A89V_LC_ | | ATYYADSVKERFTISRDDSKNTVYLQMNNLKTEDTAVYYCVRHRNFGNSYLSWFAYWG |
| | 6Q4K-VH | | QGTLVTVSS |
| 599 | E2M_HC_M41I_ | artificial | QTVVTQEPSLTVSPGGTVTLTCRSSTGAVTSGYYPNWVQKKPGQAPRGLIGATDMRPS |
| | A89V_LC_ | | GTPARFSGSLLGGKAALTLSGVQPEDEAEYYCALWYSNRWVFGGGTKLTVL |
| | Q46K-VL | | |
| 600 | E2M_HC_M41I_ | artificial | EVQLVESGGGLVQPGGSLKLSCAASGFTFNGYAINWVRQAPGKGVEWVARIRSKYNNY |
| | L52V_A89V_ | | ATYYADSVKERFTISRDDSKNTVYLQMNNLKTEDTAVYYCVRHRNFGNSYLSWFAYWG |
| | LC_L21I_ | | QGTLVTVSS |
| | Q46K_G141S_ | | |
| | V44F-VH | | |
| 601 | E2M_HC_M41I_ | artificial | QTVVTQEPSLTVSPGGTVTITCRSSTGAVTSGYYPNWFQKKPGQAPRGLIGATDMRPS |
| | L52V_A89V_ | | GTPARFSGSLLGGKAALTLSGVQPEDEAEYYCALWYSNRWVFGSGTKLTVL |
| | LC_L21I_ | | |
| | Q46K_G141S_ | | |
| | FV44-VL | | |
| 602 | E2M_HC_M41I_ | artificial | EVQLVESGGGLVQPGGSLKLSCAASGFTFNGYAINWVRQAPGKGLEWVARIRSKYNNY |
| | LC_L21I_ | | ATYYADSVKERFTISRDDSKNTAYLQMNNLKTEDTAVYYCVRHRNFGNSYLSWFAYWG |
| | Q46K_G141S- | | QGTLVTVSS |
| | VH | | |
| 603 | E2M_HC_M41I_ | artificial | QTVVTQEPSLTVSPGGTVTITCRSSTGAVTSGYYPNWVQKKPGQAPRGLIGATDMRPS |
| | LC_L21I_ | | GTPARFSGSLLGGKAALTLSGVQPEDEAEYYCALWYSNRWVFGSGTKLTVL |
| | Q46K_G141S- | | |
| | VL | | |
| 604 | E2M_HC_M41I_ | artificial | EVQLVESGGGLVQPGGSLKLSCAASGFTFNGYAINWVREAPGKGLEWVARIRSKYNNY |
| | Q46E_A89V_ | | ATYYADSVKERFTISRDDSKNTVYLQMNNLKTEDTAVYYCVRHRNFGNSYLSWFAYWG |
| | LC_L21I_ | | QGTLVTVSS |
| | Q46K_G141S- | | |
| | VH | | |
| 605 | E2M_HC_M41I_ | artificial | QTVVTQEPSLTVSPGGTVTITCRSSTGAVTSGYYPNWVQKKPGQAPRGLIGATDMRPS |
| | Q46E_A89V_ | | GTPARFSGSLLGGKAALTLSGVQPEDEAEYYCALWYSNRWVFGSGTKLTVL |
| | LC_L21I_ | | |
| | Q46K_G141S- | | |
| | VL | | |
| 606 | E2M_HC_M41V | artificial | GYAVN |
| | -HCDR1 | | |
| 607 | E2M_HC_M41V | artificial | RIRSKYNNYATYYADSVKE |
| | -HCDR2 | | |
| 608 | E2M_HC_M41V | artificial | HRNFGNSYLSWFAY |
| | -HCDR3 | | |
| 609 | E2M_HC_M41V | artificial | RSSTGAVTSGYYPN |
| | -LCDR1 | | |
| 610 | E2M_HC_M41V | artificial | ATDMRPS |
| | -LCDR2 | | |
| 611 | E2M_HC_M41V | artificial | ALWYSNRWV |
| | -LCDR3 | | |
| 612 | E2M_HC_M41V | artificial | EVQLVESGGGLVQPGGSLKLSCAASGFTFNGYAVNWVRQAPGKGLEWVARIRSKYNNY |
| | -VH | | ATYYADSVKERFTISRDDSKNTAYLQMNNLKTEDTAVYYCVRHRNFGNSYLSWFAYWG |
| | | | QGTLVTVSS |
| 613 | E2M_HC_M41V | artificial | QTVVTQEPSLTVSPGGTVTLTCRSSTGAVTSGYYPNWVQQKPGQAPRGLIGATDMRPS |
| | -VL | | GTPARFSGSLLGGKAALTLSGVQPEDEAEYYCALWYSNRWVFGGGTKLTVL |
| 614 | E2M_HC_Q46D | artificial | EVQLVESGGGLVQPGGSLKLSCAASGFTFNGYAMNWVRDAPGKGLEWVARIRSKYNNY |
| | -VH | | ATYYADSVKERFTISRDDSKNTAYLQMNNLKTEDTAVYYCVRHRNFGNSYLSWFAYWG |
| | | | QGTLVTVSS |
| 615 | E2M_HC_Q46D | artificial | QTVVTQEPSLTVSPGGTVTLTCRSSTGAVTSGYYPNWVQQKPGQAPRGLIGATDMRPS |
| | -VL | | GTPARFSGSLLGGKAALTLSGVQPEDEAEYYCALWYSNRWVFGGGTKLTVL |
| 616 | E2M_HC_Q46D_ | artificial | EVQLVESGGGLVQPGGSLKLSCAASGFTFNGYAMNWVRDAPGKGLEWVARIRSKYNNY |
| | LC_L21I_ | | ATYYADSVKERFTISRDDSKNTAYLQMNNLKTEDTAVYYCVRHRNFGNSYLSWFAYWG |
| | Q46K_G141S- | | QGTLVTVSS |
| | VH | | |
| 617 | E2M_HC_Q46D_ | artificial | QTVVTQEPSLTVSPGGTVTITCRSSTGAVTSGYYPNWVQKKPGQAPRGLIGATDMRPS |
| | LC_L21I_ | | GTPARFSGSLLGGKAALTLSGVQPEDEAEYYCALWYSNRWVFGSGTKLTVL |
| | 6Q4K_G141S- | | |
| | VL | | |
| 618 | E2M_HC_Q46D_ | artificial | EVQLVESGGGLVQPGGSLKLSCAASGFTFNGYAMNWVRDAPGKGLEWVARIRSKYNNY |
| | LC_L21I_ | | ATYYADSVKERFTISRDDSKNTAYLQMNNLKTEDTAVYYCVRHRNFGNSYLSWFAYWG |
| | Q46R_G141S- | | QGTLVTVSS |
| | VH | | |
| 619 | E2M_HC_Q46D_ | artificial | QTVVTQEPSLTVSPGGTVTITCRSSTGAVTSGYYPNWVQRKPGQAPRGLIGATDMRPS |
| | LC_L21I_ | | GTPARFSGSLLGGKAALTLSGVQPEDEAEYYCALWYSNRWVFGSGTKLTVL |
| | Q46R_G141S- | | |
| | VL | | |
| 620 | E2M_HC_Q46D_ | artificial | EVQLVESGGGLVQPGGSLKLSCAASGFTFNGYAMNWVRDAPGKGLEWVARIRSKYNNY |
| | LC_Q46K- | | ATYYADSVKERFTISRDDSKNTAYLQMNNLKTEDTAVYYCVRHRNFGNSYLSWFAYWG |
| | VH | | QGTLVTVSS |
| 621 | E2M_HC_Q46D_ | artificial | QTVVTQEPSLTVSPGGTVTLTCRSSTGAVTSGYYPNWVQKKPGQAPRGLIGATDMRPS |
| | LC_Q46K- | | GTPARFSGSLLGGKAALTLSGVQPEDEAEYYCALWYSNRWVFGGGTKLTVL |
| | VL | | |
| 622 | E2M_HC_Q46D_ | artificial | EVQLVESGGGLVQPGGSLKLSCAASGFTFNGYAMNWVRDAPGKGLEWVARIRSKYNNY |
| | LC_Q46K_ | | ATYYADSVKERFTISRDDSKNTAYLQMNNLKTEDTAVYYCVRHRNFGNSYLSWFAYWG |
| | G141S-VH | | QGTLVTVSS |
| 623 | E2M_HC_Q46D_ | artificial | QTVVTQEPSLTVSPGGTVTLTCRSSTGAVTSGYYPNWVQKKPGQAPRGLIGATDMRPS |
| | LC_Q46K_ | | GTPARFSGSLLGGKAALTLSGVQPEDEAEYYCALWYSNRWVFGSGTKLTVL |
| | G141S-VL | | |
| 624 | E2M_HC_Q46D_ | artificial | EVQLVESGGGLVQPGGSLKLSCAASGFTFNGYAMNWVRDAPGKGLEWVARIRSKYNNY |
| | LC_Q46R- | | ATYYADSVKERFTISRDDSKNTAYLQMNNLKTEDTAVYYCVRHRNFGNSYLSWFAYWG |
| | VH | | QGTLVTVSS |
| 625 | E2M_HC_Q46D_ | artificial | QTVVTQEPSLTVSPGGTVTLTCRSSTGAVTSGYYPNWVQRKPGQAPRGLIGATDMRPS |
| | LC_Q46R- | | GTPARFSGSLLGGKAALTLSGVQPEDEAEYYCALWYSNRWVFGGGTKLTVL |
| | VL | | |
| 626 | E2M_HC_Q46D_ | artificial | EVQLVESGGGLVQPGGSLKLSCAASGFTFNGYAMNWVRDAPGKGLEWVARIRSKYNNY |
| | LC_Q46R_ | | ATYYADSVKERFTISRDDSKNTAYLQMNNLKTEDTAVYYCVRHRNFGNSYLSWFAYWG |
| | 4G11S-VH | | QGTLVTVSS |
| 627 | E2M_HC_Q46D_ | artificial | QTVVTQEPSLTVSPGGTVTLTCRSSTGAVTSGYYPNWVQRKPGQAPRGLIGATDMRPS |
| | LC_Q46R_ | | GTPARFSGSLLGGKAALTLSGVQPEDEAEYYCALWYSNRWVFGSGTKLTVL |
| | G141S-VL | | |
| 628 | E2M_HC_Q46E | artificial | EVQLVESGGGLVQPGGSLKLSCAASGFTFNGYAMNWVREAPGKGLEWVARIRSKYNNY |
| | -VH | | ATYYADSVKERFTISRDDSKNTAYLQMNNLKTEDTAVYYCVRHRNFGNSYLSWFAYWG |
| | | | QGTLVTVSS |
| 629 | E2M_HC_Q46E | artificial | QTVVTQEPSLTVSPGGTVTLTCRSSTGAVTSGYYPNWVQQKPGQAPRGLIGATDMRPS |
| | -VL | | GTPARFSGSLLGGKAALTLSGVQPEDEAEYYCALWYSNRWVFGGGTKLTVL |
| 630 | E2M_HC_Q46E_ | artificial | EVQLVESGGGLVQPGGSLKLSCAASGFTFNGYAMNWVREAPGKGLEWVARIRSKYNNY |
| | LC_L21I_ | | ATYYADSVKERFTISRDDSKNTAYLQMNNLKTEDTAVYYCVRHRNFGNSYLSWFAYWG |
| | Q46K_G141S- | | QGTLVTVSS |
| | VH | | |
| 631 | E2M_HC_Q46E_ | artificial | QTVVTQEPSLTVSPGGTVTITCRSSTGAVTSGYYPNWVQKKPGQAPRGLIGATDMRPS |
| | LC_L21I_ | | GTPARFSGSLLGGKAALTLSGVQPEDEAEYYCALWYSNRWVFGSGTKLTVL |
| | Q46K_G141S- | | |
| | VL | | |
| 632 | E2M_HC_Q46E_ | artificial | EVQLVESGGGLVQPGGSLKLSCAASGFTFNGYAMNWVREAPGKGLEWVARIRSKYNNY |
| | LC_L21I_ | | ATYYADSVKERFTISRDDSKNTAYLQMNNLKTEDTAVYYCVRHRNFGNSYLSWFAYWG |
| | Q46R_G141S- | | QGTLVTVSS |
| | VH | | |
| 633 | E2M_HC_Q46E_ | artificial | QTVVTQEPSLTVSPGGTVTITCRSSTGAVTSGYYPNWVQRKPGQAPRGLIGATDMRPS |
| | LC_L21I_ | | GTPARFSGSLLGGKAALTLSGVQPEDEAEYYCALWYSNRWVFGSGTKLTVL |
| | Q46R_G141S- | | |
| | VL | | |
| 634 | E2M_HC_Q46E_ | artificial | EVQLVESGGGLVQPGGSLKLSCAASGFTFNGYAMNWVREAPGKGLEWVARIRSKYNNY |
| | LC_Q46K- | | ATYYADSVKERFTISRDDSKNTAYLQMNNLKTEDTAVYYCVRHRNFGNSYLSWFAYWG |
| | VH | | QGTLVTVSS |
| 635 | E2M_HC_Q46E_ | artificial | QTVVTQEPSLTVSPGGTVTLTCRSSTGAVTSGYYPNWVQKKPGQAPRGLIGATDMRPS |
| | LC_Q46K- | | GTPARFSGSLLGGKAALTLSGVQPEDEAEYYCALWYSNRWVFGGGTKLTVL |
| | VL | | |
| 636 | E2M_HC_Q46E_ | artificial | EVQLVESGGGLVQPGGSLKLSCAASGFTFNGYAMNWVREAPGKGLEWVARIRSKYNNY |
| | LC_Q46K_ | | ATYYADSVKERFTISRDDSKNTAYLQMNNLKTEDTAVYYCVRHRNFGNSYLSWFAYWG |
| | G141S-VH | | QGTLVTVSS |
| 637 | E2M_HC_Q46E_ | artificial | QTVVTQEPSLTVSPGGTVTLTCRSSTGAVTSGYYPNWVQKKPGQAPRGLIGATDMRPS |
| | LC_Q46K_ | | GTPARFSGSLLGGKAALTLSGVQPEDEAEYYCALWYSNRWVFGSGTKLTVL |
| | G141S-VL | | |
| 638 | E2M_HC_Q46E_ | artificial | EVQLVESGGGLVQPGGSLKLSCAASGFTFNGYAMNWVREAPGKGLEWVARIRSKYNNY |
| | LC_Q46R- | | ATYYADSVKERFTISRDDSKNTAYLQMNNLKTEDTAVYYCVRHRNFGNSYLSWFAYWG |
| | VH | | QGTLVTVSS |
| 639 | E2M_HC_Q46E_ | artificial | QTVVTQEPSLTVSPGGTVTLTCRSSTGAVTSGYYPNWVQRKPGQAPRGLIGATDMRPS |
| | LC_Q46R- | | GTPARFSGSLLGGKAALTLSGVQPEDEAEYYCALWYSNRWVFGGGTKLTVL |
| | VL | | |
| 640 | E2M_HC_Q46E_ | artificial | EVQLVESGGGLVQPGGSLKLSCAASGFTFNGYAMNWVREAPGKGLEWVARIRSKYNNY |
| | LC_Q46R_ | | ATYYADSVKERFTISRDDSKNTAYLQMNNLKTEDTAVYYCVRHRNFGNSYLSWFAYWG |
| | G141S-VH | | QGTLVTVSS |
| 641 | E2M_HC_Q46E_ | artificial | QTVVTQEPSLTVSPGGTVTLTCRSSTGAVTSGYYPNWVQRKPGQAPRGLIGATDMRPS |
| | LC_Q46R_ | | GTPARFSGSLLGGKAALTLSGVQPEDEAEYYCALWYSNRWVFGSGTKLTVL |
| | G141S-VL | | |
| 642 | E2M_HC_Q46K | artificial | EVQLVESGGGLVQPGGSLKLSCAASGFTFNGYAMNWVRKAPGKGLEWVARIRSKYNNY |
| | -VH | | ATYYADSVKERFTISRDDSKNTAYLQMNNLKTEDTAVYYCVRHRNFGNSYLSWFAYWG |
| | | | QGTLVTVSS |
| 643 | E2M_HC_Q46K | artificial | QTVVTQEPSLTVSPGGTVTLTCRSSTGAVTSGYYPNWVQQKPGQAPRGLIGATDMRPS |
| | -VL | | GTPARFSGSLLGGKAALTLSGVQPEDEAEYYCALWYSNRWVFGGGTKLTVL |
| 644 | E2M_HC_Q46R | artificial | EVQLVESGGGLVQPGGSLKLSCAASGFTFNGYAMNWVRRAPGKGLEWVARIRSKYNNY |
| | -VH | | ATYYADSVKERFTISRDDSKNTAYLQMNNLKTEDTAVYYCVRHRNFGNSYLSWFAYWG |
| | | | QGTLVTVSS |
| 645 | E2M_HC_Q46R | artificial | QTVVTQEPSLTVSPGGTVTLTCRSSTGAVTSGYYPNWVQQKPGQAPRGLIGATDMRPS |
| | -VL | | GTPARFSGSLLGGKAALTLSGVQPEDEAEYYCALWYSNRWVFGGGTKLTVL |
| 646 | E2M_HC_V107A- | artificial | EVQLVESGGGLVQPGGSLKLSCAASGFTFNGYAMNWVRQAPGKGLEWVARIRSKYNNY |
| | VH | | ATYYADSVKERFTISRDDSKNTAYLQMNNLKTEDTAVYYCARHRNFGNSYLSWFAYWG |
| | | | QGTLVTVSS |
| 647 | E2M_HC_V107A- | artificial | QTVVTQEPSLTVSPGGTVTLTCRSSTGAVTSGYYPNWVQQKPGQAPRGLIGATDMRPS |
| | VL | | GTPARFSGSLLGGKAALTLSGVQPEDEAEYYCALWYSNRWVFGGGTKLTVL |
| 648 | E2M_HC_V107L- | artificial | EVQLVESGGGLVQPGGSLKLSCAASGFTFNGYAMNWVRQAPGKGLEWVARIRSKYNNY |
| | VH | | ATYYADSVKERFTISRDDSKNTAYLQMNNLKTEDTAVYYCLRHRNFGNSYLSWFAYWG |
| | | | QGTLVTVSS |
| 649 | E2M_HC_V107L- | artificial | QTVVTQEPSLTVSPGGTVTLTCRSSTGAVTSGYYPNWVQQKPGQAPRGLIGATDMRPS |
| | VL | | GTPARFSGSLLGGKAALTLSGVQPEDEAEYYCALWYSNRWVFGGGTKLTVL |
| 650 | E2M_I2E- | artificial | GYAIN |
| | HCDR1 | | |
| 651 | E2M_I2E- | artificial | RIRSKYNNYATYYADAVKE |
| | HCDR2 | | |
| 652 | E2M_I2E- | artificial | ARNFGSSYLSWFAY |
| | HCDR3 | | |
| 653 | E2M_I2E- | artificial | RSSTGAVTSGYYPN |
| | LCDR1 | | |
| 654 | E2M_I2E- | artificial | ATDMRPS |
| | LCDR2 | | |
| 655 | E2M_I2E- | artificial | ALWYSNRWV |
| | LCDR3 | | |
| 656 | E2M_I2E- | artificial | EVQLVESGGGLVQPGGSLKLSCAASGFTFNGYAINWVRQAPGKGLEWVARIRSKYNNY |
| | VH | | ATYYADAVKERFTISRDDSKNTVYLQMNNLKTEDTAVYYCARARNFGSSYLSWFAYWG |
| | | | QGTLVTVSS |
| 657 | E2M_I2E- | artificial | QTVVTQEPSLTVSPGGTVTITCRSSTGAVTSGYYPNWVQKKPGQAPRGLIGATDMRPS |
| | VL | | GTPARFSGSLSGGKAALTLSGVQPEDEAEYYCALWYSNRWVFGSGTKLTVL |
| 658 | E2M_I2K- | artificial | GYAMN |
| | HCDR1 | | |
| 659 | E2M_I2K- | artificial | RIRSKYNNYATYYAEAVKG |
| | HCDR2 | | |
| 660 | E2M_I2K- | artificial | NENIGTSYLSWFAY |
| | HCDR3 | | |
| 661 | E2M_I2K- | artificial | RSSTGAVTSGYYPN |
| | LCDR1 | | |
| 662 | E2M_I2K- | artificial | ATDMRPS |
| | LCDR2 | | |
| 663 | E2M_I2K- | artificial | ALWYSNRWV |
| | LCDR3 | | |
| 664 | E2M_I2K- | artificial | EVQLVESGGGLVQPGGSLKLSCAASGFTFNGYAMNWVRQAPGKGLEWVARIRSKYNNY |
| | VH | | ATYYAEAVKGRFTISRDDSKNTVYLQMNNLKTEDTAVYYCVRNENIGTSYLSWFAYWG |
| | | | QGTLVTVSS |
| 665 | E2M_I2K- | artificial | QTVVTQEPSLTVSPGGTVTITCRSSTGAVTSGYYPNWVQQKPGQAPRGLIGATDMRPS |
| | VL | | GTPARFSGSLSGGKAALTLSGVQPEDEAEYYCALWYSNRWVFGSGTKLTVL |
| 666 | E2M_I2L- | artificial | GYAMN |
| | HCDR1 | | |
| 667 | E2M_I2L- | artificial | RIRSKYNNYATYYAEAVKE |
| | HCDR2 | | |
| 668 | E2M_I2L- | artificial | ARNFGSSYLSWFAY |
| | HCDR3 | | |
| 669 | E2M_I2L- | artificial | RSSTGAVTSGYYPN |
| | LCDR1 | | |
| 670 | E2M_I2L- | artificial | ATDMRPS |
| | LCDR2 | | |
| 671 | E2M_I2L- | artificial | ALYYSNRWV |
| | LCDR3 | | |
| 672 | E2M_I2L- | artificial | EVQLVESGGGLVQPGGSLKLSCAASGFTFNGYAMNWVRQAPGKGMEWVARIRSKYNNY |
| | VH | | ATYYADAVKERFTISRDDSKNTLYLQMNNLKTEDTAVYYCVRARNFGSSYLSWFAYWG |
| | | | QGTLVTVSS |
| 673 | E2M_I2L- | artificial | QTVVTQEPSLTVSPGGTVTITCRSSTGAVTSGYYPNWIQKKPGQAPRGLIGATDMRPS |
| | VL | | GTPARFSGSLEGGKAALTLSGVQPEDEAEYYCALYYSNRWVFGSGTKLTVL |
| 674 | E2M_I2M- | artificial | GYAMN |
| | HCDR1 | | |
| 675 | E2M_I2M- | artificial | RIRSKYNNYATYYADAVKE |
| | HCDR2 | | |
| 676 | E2M_I2M- | artificial | ARNFGTSYLSWFAY |
| | HCDR3 | | |
| 677 | E2M_I2M- | artificial | RSSTGAVTSGYYPN |
| | LCDR1 | | |
| 678 | E2M_I2M- | artificial | ATDMRPS |
| | LCDR2 | | |
| 679 | E2M_I2M- | artificial | ALWYSNRWV |
| | LCDR3 | | |
| 680 | E2M_I2M- | artificial | EVQLVESGGGLVQPGGSLKLSCAASGFTFNGYAMNWVRQAPGKGMEWVARIRSKYNNY |
| | VH | | ATYYADAVKERFTISRDDSKNTLYLQMNNLKTEDTAVYYCVRARNFGTSYLSWFAYWG |
| | | | QGTLVTVSS |
| 681 | E2M_I2M- | artificial | QTVVTQEPSLTVSPGGTVTITCRSSTGAVTSGYYPNWVQKKPGQAPRGLIGATDMRPS |
| | VL | | GTPARFSGSLSGGKAALTLSGVQPEDEAEYYCALWYSNRWVFGSGTKLTVL |
| 682 | E2M_I2M2- | artificial | GYAIN |
| | HCDR1 | | |
| 683 | E2M_I2M2- | artificial | RIRSKYNNYATYYADAVKE |
| | HCDR2 | | |
| 684 | E2M_I2M2- | artificial | NANFGTSYLSFFAY |
| | HCDR3 | | |
| 685 | E2M_I2M2- | artificial | RSSTGAVTSGYYPN |
| | LCDR1 | | |
| 686 | E2M_I2M2- | artificial | ATDMRPS |
| | LCDR2 | | |
| 687 | E2M_I2M2- | artificial | ALWYSNRWV |
| | LCDR3 | | |
| 688 | E2M_I2M2- | artificial | EVQLVESGGGLVQPGGSLKLSCAASGFTENGYAINWVREAPGKGLEWVARIRSKYNNY |
| | VH | | ATYYADAVKERFTISRDDSKNTAYLQMNNLKTEDTAVYYCVRNANFGTSYLSYFAYWG |
| | | | QGTLVTVSS |
| 689 | E2M_I2M2- | artificial | QTVVTQEPSLTVSPGGTVTLTCRSSTGAVTSGYYPNWVQKKPGQAPRGLIGATDMRPS |
| | VL | | GTPARFSGSLLGGKAALTLSGVQPEDEAEYYCALWYSNRWVFGSGTKLTVL |
| 690 | E2M_LC_G141S- | artificial | EVQLVESGGGLVQPGGSLKLSCAASGFTFNGYAMNWVRQAPGKGLEWVARIRSKYNNY |
| | VH | | ATYYADSVKERFTISRDDSKNTAYLQMNNLKTEDTAVYYCVRHRNFGNSYLSWFAYWG |
| | | | QGTLVTVSS |
| 691 | E2M_LC_G141S- | artificial | QTVVTQEPSLTVSPGGTVTLTCRSSTGAVTSGYYPNWVQQKPGQAPRGLIGATDMRPS |
| | VL | | GTPARFSGSLLGGKAALTLSGVQPEDEAEYYCALWYSNRWVFGSGTKLTVL |
| 692 | E2M_LC_G141S_ | artificial | EVQLVESGGGLVQPGGSLKLSCAASGFTFNGYAMNWVRQAPGKGLEWVARIRSKYNNY |
| | L21I-VH | | ATYYADSVKERFTISRDDSKNTAYLQMNNLKTEDTAVYYCVRHRNFGNSYLSWFAYWG |
| | | | QGTLVTVSS |
| 693 | E2M_LC_G141S_ | artificial | QTVVTQEPSLTVSPGGTVTITCRSSTGAVTSGYYPNWVQQKPGQAPRGLIGATDMRPS |
| | L21I-VL | | GTPARFSGSLLGGKAALTLSGVQPEDEAEYYCALWYSNRWVFGSGTKLTVL |
| 694 | E2M_LC_L83E | artificial | EVQLVESGGGLVQPGGSLKLSCAASGFTFNGYAMNWVRQAPGKGLEWVARIRSKYNNY |
| | -VH | | ATYYADSVKERFTISRDDSKNTAYLQMNNLKTEDTAVYYCVRHRNFGNSYLSWFAYWG |
| | | | QGTLVTVSS |
| 695 | E2M_LC_L83E | artificial | QTVVTQEPSLTVSPGGTVTLTCRSSTGAVTSGYYPNWVQQKPGQAPRGLIGATDMRPS |
| | -VL | | GTPARFSGSLEGGKAALTLSGVQPEDEAEYYCALWYSNRWVFGGGTKLTVL |
| 696 | E2M_LC_L83S | artificial | EVQLVESGGGLVQPGGSLKLSCAASGFTFNGYAMNWVRQAPGKGLEWVARIRSKYNNY |
| | -VH | | ATYYADSVKERFTISRDDSKNTAYLQMNNLKTEDTAVYYCVRHRNFGNSYLSWFAYWG |
| | | | QGTLVTVSS |
| 697 | E2M_LC_L83S | artificial | QTVVTQEPSLTVSPGGTVTLTCRSSTGAVTSGYYPNWVQQKPGQAPRGLIGATDMRPS |
| | -VL | | GTPARFSGSLSGGKAALTLSGVQPEDEAEYYCALWYSNRWVFGGGTKLTVL |
| 698 | E2M_LC_Q46E | artificial | EVQLVESGGGLVQPGGSLKLSCAASGFTFNGYAMNWVRQAPGKGLEWVARIRSKYNNY |
| | -VH | | ATYYADSVKERFTISRDDSKNTAYLQMNNLKTEDTAVYYCVRHRNFGNSYLSWFAYWG |
| | | | QGTLVTVSS |
| 699 | E2M_LC_Q46E | artificial | QTVVTQEPSLTVSPGGTVTLTCRSSTGAVTSGYYPNWVQEKPGQAPRGLIGATDMRPS |
| | -VL | | GTPARFSGSLLGGKAALTLSGVQPEDEAEYYCALWYSNRWVFGGGTKLTVL |
| 700 | E2M_LC_Q46K | artificial | EVQLVESGGGLVQPGGSLKLSCAASGFTFNGYAMNWVRQAPGKGLEWVARIRSKYNNY |
| | -VH | | ATYYADSVKERFTISRDDSKNTAYLQMNNLKTEDTAVYYCVRHRNFGNSYLSWFAYWG |
| | | | QGTLVTVSS |
| 701 | E2M_LC_Q46K | artificial | QTVVTQEPSLTVSPGGTVTLTCRSSTGAVTSGYYPNWVQKKPGQAPRGLIGATDMRPS |
| | -VL | | GTPARFSGSLLGGKAALTLSGVQPEDEAEYYCALWYSNRWVFGGGTKLTVL |
| 702 | E2M_LC_A107L- | artificial | GYAMN |
| | HCDR1 | | |
| 703 | E2M_LC_A107L- | artificial | RIRSKYNNYATYYADSVKE |
| | HCDR2 | | |
| 704 | E2M_LC_A107L- | artificial | HRNFGNSYLSWFAY |
| | HCDR3 | | |
| 705 | E2M_LC_A107L- | artificial | RSSTGAVTSGYYPN |
| | LCDR1 | | |
| 706 | E2M_LC_A107L- | artificial | ATDMRPS |
| | LCDR2 | | |
| 707 | E2M_LC_A107L- | artificial | LLWYSNRWV |
| | LCDR3 | | |
| 708 | E2M_LC_A107L- | artificial | EVQLVESGGGLVQPGGSLKLSCAASGFTFNGYAMNWVRQAPGKGLEWVARIRSKYNNY |
| | VH | | ATYYADSVKERFTISRDDSKNTAYLQMNNLKTEDTAVYYCVRHRNFGNSYLSWFAYWG |
| | | | QGTLVTVSS |
| 709 | E2M_LC_A107L- | artificial | QTVVTQEPSLTVSPGGTVTLTCRSSTGAVTSGYYPNWVQQKPGQAPRGLIGATDMRPS |
| | VL | | GTPARFSGSLLGGKAALTLSGVQPEDEAEYYCLLWYSNRWVFGGGTKLTVL |
| 710 | E2M_LC_V44I | artificial | EVQLVESGGGLVQPGGSLKLSCAASGFTFNGYAMNWVRQAPGKGLEWVARIRSKYNNY |
| | -VH | | ATYYADSVKERFTISRDDSKNTAYLQMNNLKTEDTAVYYCVRHRNFGNSYLSWFAYWG |
| | | | QGTLVTVSS |
| 711 | E2M_LC_V44I | artificial | QTVVTQEPSLTVSPGGTVTLTCRSSTGAVTSGYYPNWIQQKPGQAPRGLIGATDMRPS |
| | -VL | | GTPARFSGSLLGGKAALTLSGVQPEDEAEYYCALWYSNRWVFGGGTKLTVL |
| 712 | E2M_LC_V44L | artificial | EVQLVESGGGLVQPGGSLKLSCAASGFTFNGYAMNWVRQAPGKGLEWVARIRSKYNNY |
| | -VH | | ATYYADSVKERFTISRDDSKNTAYLQMNNLKTEDTAVYYCVRHRNFGNSYLSWFAYWG |
| | | | QGTLVTVSS |
| 713 | E2M_LC_V44L | artificial | QTVVTQEPSLTVSPGGTVTLTCRSSTGAVTSGYYPNWLQQKPGQAPRGLIGATDMRPS |
| | -VL | | GTPARFSGSLLGGKAALTLSGVQPEDEAEYYCALWYSNRWVFGGGTKLTVL |
| 714 | E2M_LC_V44M | artificial | EVQLVESGGGLVQPGGSLKLSCAASGFTFNGYAMNWVRQAPGKGLEWVARIRSKYNNY |
| | -VH | | ATYYADSVKERFTISRDDSKNTAYLQMNNLKTEDTAVYYCVRHRNFGNSYLSWFAYWG |
| | | | QGTLVTVSS |
| 715 | E2M_LC_V44M | artificial | QTVVTQEPSLTVSPGGTVTLTCRSSTGAVTSGYYPNWMQQKPGQAPRGLIGATDMRPS |
| | -VL | | GTPARFSGSLLGGKAALTLSGVQPEDEAEYYCALWYSNRWVFGGGTKLTVL |
| 716 | E2M_LC_W109Y- | artificial | GYAMN |
| | HCDR1 | | |
| 717 | E2M_LC_W109Y- | artificial | RIRSKYNNYATYYADSVKE |
| | HCDR2 | | |
| 718 | E2M_LC_W109Y- | artificial | HRNFGNSYLSWFAY |
| | HCDR3 | | |
| 719 | E2M_LC_W109Y- | artificial | RSSTGAVTSGYYPN |
| | LCDR1 | | |
| 720 | E2M_LC_W109Y- | artificial | ATDMRPS |
| | LCDR2 | | |
| 721 | E2M_LC_W109Y- | artificial | ALYYSNRWV |
| | LCDR3 | | |
| 722 | E2M_LC_W109Y- | artificial | EVQLVESGGGLVQPGGSLKLSCAASGFTENGYAMNWVRQAPGKGLEWVARIRSKYNNY |
| | VH | | ATYYADSVKERFTISRDDSKNTAYLQMNNLKTEDTAVYYCVRHRNFGNSYLSWFAYWG |
| | | | QGTLVTVSS |
| 723 | E2M_LC_W109Y- | artificial | QTVVTQEPSLTVSPGGTVTLTCRSSTGAVTSGYYPNWVQQKPGQAPRGLIGATDMRPS |
| | VL | | GTPARFSGSLLGGKAALTLSGVQPEDEAEYYCALYYSNRWVFGGGTKLTVL |
| 724 | F12Q- | artificial | SYAMN |
| | HCDR1 | | |
| 725 | F12Q- | artificial | RIRSKYNNYATYYADSVKG |
| | HCDR2 | | |
| 726 | F12Q- | artificial | HGNFGNSYVSWWAY |
| | HCDR3 | | |
| 727 | F12Q- | artificial | GSSTGAVTSGNYPN |
| | LCDR1 | | |
| 728 | F12Q | artificial | GTKFLAP |
| | LCDR2 | | |
| 729 | F12Q | artificial | VLWYSNRWV |
| | LCDR3 | | |
| 730 | F12Q-VH | artificial | EVQLVESGGGLVQPGGSLKLSCAASGFTFNSYAMNWVRQAPGKGLEWVARIRSKYNNY |
| | | | ATYYADSVKGRFTISRDDSKNTAYLQMNNLKTEDTAVYYCVRHGNFGNSYVSWWAYWG |
| | | | QGTLVTVSS |
| 731 | F12Q-VL | artificial | QTVVTQEPSLTVSPGGTVTLTCGSSTGAVTSGNYPNWVQQKPGQAPRGLIGGTKFLAP |
| | | | GTPARFSGSLLGGKAALTLSGVQPEDEAEYYCVLWYSNRWVFGGGTKLTVL |
| 732 | F12Q_HC_A89I- | artificial | EVQLVESGGGLVQPGGSLKLSCAASGFTFNSYAMNWVRQAPGKGLEWVARIRSKYNNY |
| | VH | | ATYYADSVKGRFTISRDDSKNTIYLQMNNLKTEDTAVYYCVRHGNFGNSYVSWWAYWG |
| | | | QGTLVTVSS |
| 733 | F12Q_HC_A89I- | artificial | QTVVTQEPSLTVSPGGTVTLTCGSSTGAVTSGNYPNWVQQKPGQAPRGLIGGTKFLAP |
| | VL | | GTPARFSGSLLGGKAALTLSGVQPEDEAEYYCVLWYSNRWVFGGGTKLTVL |
| 734 | F12Q_HC_A89L- | artificial | EVQLVESGGGLVQPGGSLKLSCAASGFTFNSYAMNWVRQAPGKGLEWVARIRSKYNNY |
| | VH | | ATYYADSVKGRFTISRDDSKNTLYLQMNNLKTEDTAVYYCVRHGNFGNSYVSWWAYWG |
| | | | QGTLVTVSS |
| 735 | F12Q_HC_A89L- | artificial | QTVVTQEPSLTVSPGGTVTLTCGSSTGAVTSGNYPNWVQQKPGQAPRGLIGGTKFLAP |
| | VL | | GTPARFSGSLLGGKAALTLSGVQPEDEAEYYCVLWYSNRWVFGGGTKLTVL |
| 736 | F12Q_HC_A89T- | artificial | EVQLVESGGGLVQPGGSLKLSCAASGFTFNSYAMNWVRQAPGKGLEWVARIRSKYNNY |
| | VH | | ATYYADSVKGRFTISRDDSKNTTYLQMNNLKTEDTAVYYCVRHGNFGNSYVSWWAYWG |
| | | | QGTLVTVSS |
| 737 | F12Q_HC_A89T- | artificial | QTVVTQEPSLTVSPGGTVTLTCGSSTGAVTSGNYPNWVQQKPGQAPRGLIGGTKFLAP |
| | VL | | GTPARFSGSLLGGKAALTLSGVQPEDEAEYYCVLWYSNRWVFGGGTKLTVL |
| 738 | F12Q_HC_A89V- | artificial | EVQLVESGGGLVQPGGSLKLSCAASGFTENSYAMNWVRQAPGKGLEWVARIRSKYNNY |
| | VH | | ATYYADSVKGRFTISRDDSKNTVYLQMNNLKTEDTAVYYCVRHGNFGNSYVSWWAYWG |
| | | | QGTLVTVSS |
| 739 | F12Q_HC_A89V- | artificial | QTVVTQEPSLTVSPGGTVTLTCGSSTGAVTSGNYPNWVQQKPGQAPRGLIGGTKFLAP |
| | VL | | GTPARFSGSLLGGKAALTLSGVQPEDEAEYYCVLWYSNRWVFGGGTKLTVL |
| 740 | F12Q_HC_L52M- | artificial | EVQLVESGGGLVQPGGSLKLSCAASGFTFNSYAMNWVRQAPGKGMEWVARIRSKYNNY |
| | VH | | ATYYADSVKGRFTISRDDSKNTAYLQMNNLKTEDTAVYYCVRHGNFGNSYVSWWAYWG |
| | | | QGTLVTVSS |
| 741 | F12Q_HC_L52M- | artificial | QTVVTQEPSLTVSPGGTVTLTCGSSTGAVTSGNYPNWVQQKPGQAPRGLIGGTKFLAP |
| | VL | | GTPARFSGSLLGGKAALTLSGVQPEDEAEYYCVLWYSNRWVFGGGTKLTVL |
| 742 | F12Q_HC_L52M_ | artificial | EVQLVESGGGLVQPGGSLKLSCAASGFTFNSYAMNWVRQAPGKGMEWVARIRSKYNNY |
| | LC_L21I_ | | ATYYADSVKGRFTISRDDSKNTAYLQMNNLKTEDTAVYYCVRHGNFGNSYVSWWAYWG |
| | Q46K_G141S- | | QGTLVTVSS |
| | VH | | |
| 743 | F12Q_HC_L52M_ | artificial | QTVVTQEPSLTVSPGGTVTITCGSSTGAVTSGNYPNWVQKKPGQAPRGLIGGTKFLAP |
| | LC_L21I_ | | GTPARFSGSLLGGKAALTLSGVQPEDEAEYYCVLWYSNRWVFGSGTKLTVL |
| | Q46K_G141S- | | |
| | VL | | |
| 744 | F12Q_HC_L52M_ | artificial | EVQLVESGGGLVQPGGSLKLSCAASGFTENSYAMNWVRQAPGKGMEWVARIRSKYNNY |
| | LC_Q46K- | | ATYYADSVKGRFTISRDDSKNTAYLQMNNLKTEDTAVYYCVRHGNFGNSYVSWWAYWG |
| | VH | | QGTLVTVSS |
| 745 | F12Q_HC_L52M_ | artificial | QTVVTQEPSLTVSPGGTVTLTCGSSTGAVTSGNYPNWVQKKPGQAPRGLIGGTKFLAP |
| | LC_Q46K- | | GTPARFSGSLLGGKAALTLSGVQPEDEAEYYCVLWYSNRWVFGGGTKLTVL |
| | VL | | |
| 746 | F12Q_HC_L52M_ | artificial | EVQLVESGGGLVQPGGSLKLSCAASGFTFNSYAMNWVRQAPGKGMEWVARIRSKYNNY |
| | LC_Q46K_ | | ATYYADSVKGRFTISRDDSKNTAYLQMNNLKTEDTAVYYCVRHGNFGNSYVSWWAYWG |
| | G141S-VH | | QGTLVTVSS |
| 747 | F12Q_HC_L52M_ | artificial | QTVVTQEPSLTVSPGGTVTLTCGSSTGAVTSGNYPNWVQKKPGQAPRGLIGGTKFLAP |
| | LC_Q46K_ | | GTPARFSGSLLGGKAALTLSGVQPEDEAEYYCVLWYSNRWVFGSGTKLTVL |
| | G141S-VL | | |
| 748 | F12Q_HC_L52V- | artificial | EVQLVESGGGLVQPGGSLKLSCAASGFTFNSYAMNWVRQAPGKGVEWVARIRSKYNNY |
| | VH | | ATYYADSVKGRFTISRDDSKNTAYLQMNNLKTEDTAVYYCVRHGNFGNSYVSWWAYWG |
| | | | QGTLVTVSS |
| 749 | F12Q_HC_L52V- | artificial | QTVVTQEPSLTVSPGGTVTLTCGSSTGAVTSGNYPNWVQQKPGQAPRGLIGGTKFLAP |
| | VL | | GTPARFSGSLLGGKAALTLSGVQPEDEAEYYCVLWYSNRWVFGGGTKLTVL |
| 750 | F12Q_HC_L52V_ | artificial | EVQLVESGGGLVQPGGSLKLSCAASGFTFNSYAMNWVRQAPGKGVEWVARIRSKYNNY |
| | LC_V44F- | | ATYYADSVKGRFTISRDDSKNTAYLQMNNLKTEDTAVYYCVRHGNFGNSYVSWWAYWG |
| | VH | | QGTLVTVSS |
| 751 | F12Q_HC_L52V_ | artificial | QTVVTQEPSLTVSPGGTVTLTCGSSTGAVTSGNYPNWFQQKPGQAPRGLIGGTKFLAP |
| | LC_V44F- | | GTPARFSGSLLGGKAALTLSGVQPEDEAEYYCVLWYSNRWVFGGGTKLTVL |
| | VL | | |
| 752 | F12Q_HC_L52V_ | artificial | EVQLVESGGGLVQPGGSLKLSCAASGFTFNSYAMNWVRQAPGKGVEWVARIRSKYNNY |
| | LC_V44Y- | | ATYYADSVKGRFTISRDDSKNTAYLQMNNLKTEDTAVYYCVRHGNFGNSYVSWWAYWG |
| | VH | | QGTLVTVSS |
| 753 | F12Q_HC_L52V_ | artificial | QTVVTQEPSLTVSPGGTVTLTCGSSTGAVTSGNYPNWYQQKPGQAPRGLIGGTKFLAP |
| | LC_V44Y- | | GTPARFSGSLLGGKAALTLSGVQPEDEAEYYCVLWYSNRWVFGGGTKLTVL |
| | VL | | |
| 754 | F12Q_HC_M41F_ | artificial | SYAFN |
| | A89V- | | |
| | HCDR1 | | |
| 755 | F12Q_HC_M41F_ | artificial | RIRSKYNNYATYYADSVKG |
| | A89V-HCDR2 | | |
| 756 | F12Q_HC_M41F_ | artificial | HGNFGNSYVSWWAY |
| | A89V-HCDR3 | | |
| 757 | F12Q_HC_M41F_ | artificial | GSSTGAVTSGNYPN |
| | A89V- | | |
| | LCDR1 | | |
| 758 | F12Q_HC_M41F_ | artificial | GTKFLAP |
| | A89V- | | |
| | LCDR2 | | |
| 759 | F12Q_HC_M41F_ | artificial | VLWYSNRWV |
| | A89V- | | |
| | LCDR3 | | |
| 760 | F12Q_HC_M41F_ | artificial | EVQLVESGGGLVQPGGSLKLSCAASGFTENSYAFNWVRQAPGKGLEWVARIRSKYNNY |
| | A89V-VH | | ATYYADSVKGRFTISRDDSKNTVYLQMNNLKTEDTAVYYCVRHGNFGNSYVSWWAYWG |
| | | | QGTLVTVSS |
| 761 | F12Q_HC_M41F_ | artificial | QTVVTQEPSLTVSPGGTVTLTCGSSTGAVTSGNYPNWVQQKPGQAPRGLIGGTKFLAP |
| | A89V-VL | | GTPARFSGSLLGGKAALTLSGVQPEDEAEYYCVLWYSNRWVFGGGTKLTVL |
| 762 | F12Q_HC_M41I- | artificial | SYAIN |
| | HCDR1 | | |
| 763 | F12Q_HC_M41I- | artificial | RIRSKYNNYATYYADSVKG |
| | HCDR2 | | |
| 764 | F12Q_HC_M41I- | artificial | HGNFGNSYVSWWAY |
| | HCDR3 | | |
| 765 | F12Q_HC_M41I- | artificial | GSSTGAVTSGNYPN |
| | LCDR1 | | |
| 766 | F12Q_HC_M41I- | artificial | GTKFLAP |
| | LCDR2 | | |
| 767 | F12Q_HC_M41I- | artificial | VLWYSNRWV |
| | LCDR3 | | |
| 768 | F12Q_HC_M41I- | artificial | EVQLVESGGGLVQPGGSLKLSCAASGFTFNSYAINWVRQAPGKGLEWVARIRSKYNNY |
| | VH | | ATYYADSVKGRFTISRDDSKNTAYLQMNNLKTEDTAVYYCVRHGNFGNSYVSWWAYWG |
| | | | QGTLVTVSS |
| 769 | F12Q_HC_M41I- | artificial | QTVVTQEPSLTVSPGGTVTLTCGSSTGAVTSGNYPNWVQQKPGQAPRGLIGGTKFLAP |
| | VL | | GTPARFSGSLLGGKAALTLSGVQPEDEAEYYCVLWYSNRWVFGGGTKLTVL |
| 770 | F12Q_HC_M41I_ | artificial | EVQLVESGGGLVQPGGSLKLSCAASGFTENSYAINWVRQAPGKGLEWVARIRSKYNNY |
| | A89L-VH | | ATYYADSVKGRFTISRDDSKNTLYLQMNNLKTEDTAVYYCVRHGNFGNSYVSWWAYWG |
| | | | QGTLVTVSS |
| 771 | F12Q_HC_M41I_ | artificial | QTVVTQEPSLTVSPGGTVTLTCGSSTGAVTSGNYPNWVQQKPGQAPRGLIGGTKFLAP |
| | A89L-VL | | GTPARFSGSLLGGKAALTLSGVQPEDEAEYYCVLWYSNRWVFGGGTKLTVL |
| 772 | F12Q_HC_M41I_ | artificial | EVQLVESGGGLVQPGGSLKLSCAASGFTENSYAINWVRQAPGKGLEWVARIRSKYNNY |
| | A89V-VH | | ATYYADSVKGRFTISRDDSKNTVYLQMNNLKTEDTAVYYCVRHGNFGNSYVSWWAYWG |
| | | | QGTLVTVSS |
| 773 | F12Q_HC_M41I_ | artificial | QTVVTQEPSLTVSPGGTVTLTCGSSTGAVTSGNYPNWVQQKPGQAPRGLIGGTKFLAP |
| | A89V-VL | | GTPARFSGSLLGGKAALTLSGVQPEDEAEYYCVLWYSNRWVFGGGTKLTVL |
| 774 | F12Q_HC_M41I_ | artificial | EVQLVESGGGLVQPGGSLKLSCAASGFTFNSYAINWVRQAPGKGLEWVARIRSKYNNY |
| | A89V_LC_ | | ATYYADSVKGRFTISRDDSKNTVYLQMNNLKTEDTAVYYCVRHGNFGNSYVSWWAYWG |
| | L21I_Q46K_ | | QGTLVTVSS |
| | 4G11S-VH | | |
| 775 | F12Q_HC_M41I_ | artificial | QTVVTQEPSLTVSPGGTVTITCGSSTGAVTSGNYPNWVQKKPGQAPRGLIGGTKFLAP |
| | A89V_LC_ | | GTPARFSGSLLGGKAALTLSGVQPEDEAEYYCVLWYSNRWVFGSGTKLTVL |
| | L21I_Q46K_ | | |
| | G141S-VL | | |
| 776 | F12Q_HC_M41I_ | artificial | EVQLVESGGGLVQPGGSLKLSCAASGFTFNSYAINWVRQAPGKGLEWVARIRSKYNNY |
| | A89V_LC_ | | ATYYADSVKGRFTISRDDSKNTVYLQMNNLKTEDTAVYYCVRHGNFGNSYVSWWAYWG |
| | Q46K-VH | | QGTLVTVSS |
| 777 | F12Q_HC_M41I_ | artificial | QTVVTQEPSLTVSPGGTVTLTCGSSTGAVTSGNYPNWVQKKPGQAPRGLIGGTKFLAP |
| | A89V_LC_ | | GTPARFSGSLLGGKAALTLSGVQPEDEAEYYCVLWYSNRWVFGGGTKLTVL |
| | Q46K-VL | | |
| 778 | F12Q_HC_M41I_ | artificial | EVQLVESGGGLVQPGGSLKLSCAASGFTFNSYAINWVRQAPGKGVEWVARIRSKYNNY |
| | L52V_A89V_ | | ATYYADSVKGRFTISRDDSKNTVYLQMNNLKTEDTAVYYCVRHGNFGNSYVSWWAYWG |
| | LC_L21I_ | | QGTLVTVSS |
| | Q46K_G141S_ | | |
| | V44F-VH | | |
| 779 | F12Q_HC_M41I_ | artificial | QTVVTQEPSLTVSPGGTVTITCGSSTGAVTSGNYPNWFQKKPGQAPRGLIGGTKFLAP |
| | L52V_A89V_ | | GTPARFSGSLLGGKAALTLSGVQPEDEAEYYCVLWYSNRWVFGSGTKLTVL |
| | LC_L21I_ | | |
| | Q46K_G141S_ | | |
| | V44F-VL | | |
| 780 | F12Q_HC_M41I_ | artificial | EVQLVESGGGLVQPGGSLKLSCAASGFTFNSYAINWVRQAPGKGLEWVARIRSKYNNY |
| | LC_L21I_ | | ATYYADSVKGRFTISRDDSKNTAYLQMNNLKTEDTAVYYCVRHGNFGNSYVSWWAYWG |
| | Q46K_G141S- | | QGTLVTVSS |
| | VH | | |
| 781 | F12Q_HC_M41I_ | artificial | QTVVTQEPSLTVSPGGTVTITCGSSTGAVTSGNYPNWVQKKPGQAPRGLIGGTKFLAP |
| | LC_L21I_ | | GTPARFSGSLLGGKAALTLSGVQPEDEAEYYCVLWYSNRWVFGSGTKLTVL |
| | Q46K_G141S- | | |
| | VL | | |
| 782 | F12Q_HC_M41I_ | artificial | EVQLVESGGGLVQPGGSLKLSCAASGFTFNSYAINWVREAPGKGLEWVARIRSKYNNY |
| | Q46E_A89V_ | | ATYYADSVKGRFTISRDDSKNTVYLQMNNLKTEDTAVYYCVRHGNFGNSYVSWWAYWG |
| | LC_L21I_ | | QGTLVTVSS |
| | Q46K_G141S- | | |
| | VH | | |
| 783 | F12Q_HC_M41I_ | artificial | QTVVTQEPSLTVSPGGTVTITCGSSTGAVTSGNYPNWVQKKPGQAPRGLIGGTKFLAP |
| | Q46E_A89V_ | | GTPARFSGSLLGGKAALTLSGVQPEDEAEYYCVLWYSNRWVFGSGTKLTVL |
| | LC_L21I_ | | |
| | Q46K_G141S- | | |
| | VL | | |
| 784 | F12Q_HC_M41V- | artificial | SYAVN |
| | HCDR1 | | |
| 785 | F12Q_HC_M41V- | artificial | RIRSKYNNYATYYADSVKG |
| | HCDR2 | | |
| 786 | F12Q_HC_M41V- | artificial | HGNFGNSYVSWWAY |
| | HCDR3 | | |
| 787 | F12Q_HC_M41V- | artificial | GSSTGAVTSGNYPN |
| | LCDR1 | | |
| 788 | F12Q_HC_M41V- | artificial | GTKFLAP |
| | LCDR2 | | |
| 789 | F12Q_HC_M41V- | artificial | VLWYSNRWV |
| | LCDR3 | | |
| 790 | F12Q_HC_M41V- | artificial | EVQLVESGGGLVQPGGSLKLSCAASGFTFNSYAVNWVRQAPGKGLEWVARIRSKYNNY |
| | VH | | ATYYADSVKGRFTISRDDSKNTAYLQMNNLKTEDTAVYYCVRHGNFGNSYVSWWAYWG |
| | | | QGTLVTVSS |
| 791 | F12Q_HC_M41V- | artificial | QTVVTQEPSLTVSPGGTVTLTCGSSTGAVTSGNYPNWVQQKPGQAPRGLIGGTKFLAP |
| | VL | | GTPARFSGSLLGGKAALTLSGVQPEDEAEYYCVLWYSNRWVFGGGTKLTVL |
| 792 | F12Q_HC_Q46D- | artificial | EVQLVESGGGLVQPGGSLKLSCAASGFTFNSYAMNWVRDAPGKGLEWVARIRSKYNNY |
| | VH | | ATYYADSVKGRFTISRDDSKNTAYLQMNNLKTEDTAVYYCVRHGNFGNSYVSWWAYWG |
| | | | QGTLVTVSS |
| 793 | F12Q_HC_Q46D- | artificial | QTVVTQEPSLTVSPGGTVTLTCGSSTGAVTSGNYPNWVQQKPGQAPRGLIGGTKFLAP |
| | VL | | GTPARFSGSLLGGKAALTLSGVQPEDEAEYYCVLWYSNRWVFGGGTKLTVL |
| 794 | F12Q_HC_Q46D_ | artificial | EVQLVESGGGLVQPGGSLKLSCAASGFTFNSYAMNWVRDAPGKGLEWVARIRSKYNNY |
| | LC_L21I_ | | ATYYADSVKGRFTISRDDSKNTAYLQMNNLKTEDTAVYYCVRHGNFGNSYVSWWAYWG |
| | Q46K_G141S- | | QGTLVTVSS |
| | VH | | |
| 795 | F12Q_HC_Q46D_ | artificial | QTVVTQEPSLTVSPGGTVTITCGSSTGAVTSGNYPNWVQKKPGQAPRGLIGGTKFLAP |
| | LC_L211_ | | GTPARFSGSLLGGKAALTLSGVQPEDEAEYYCVLWYSNRWVFGSGTKLTVL |
| | Q46K_G141S- | | |
| | VL | | |
| 796 | F12Q_HC_Q46D_ | artificial | EVQLVESGGGLVQPGGSLKLSCAASGFTFNSYAMNWVRDAPGKGLEWVARIRSKYNNY |
| | LC_L21I_ | | ATYYADSVKGRFTISRDDSKNTAYLQMNNLKTEDTAVYYCVRHGNFGNSYVSWWAYWG |
| | Q46R_G141S- | | QGTLVTVSS |
| | VH | | |
| 797 | F12Q_HC_Q46D_ | artificial | QTVVTQEPSLTVSPGGTVTITCGSSTGAVTSGNYPNWVQRKPGQAPRGLIGGTKFLAP |
| | LC_L21I_ | | GTPARFSGSLLGGKAALTLSGVQPEDEAEYYCVLWYSNRWVFGSGTKLTVL |
| | Q46R_G141S- | | |
| | VL | | |
| 798 | F12Q_HC_Q46D_ | artificial | EVQLVESGGGLVQPGGSLKLSCAASGFTFNSYAMNWVRDAPGKGLEWVARIRSKYNNY |
| | LC_Q46K- | | ATYYADSVKGRFTISRDDSKNTAYLQMNNLKTEDTAVYYCVRHGNFGNSYVSWWAYWG |
| | VH | | QGTLVTVSS |
| 799 | F12Q_HC_Q46D_ | artificial | QTVVTQEPSLTVSPGGTVTLTCGSSTGAVTSGNYPNWVQKKPGQAPRGLIGGTKFLAP |
| | LC_Q46K- | | GTPARFSGSLLGGKAALTLSGVQPEDEAEYYCVLWYSNRWVFGGGTKLTVL |
| | VL | | |
| 800 | F12Q_HC_Q46D_ | artificial | EVQLVESGGGLVQPGGSLKLSCAASGFTFNSYAMNWVRDAPGKGLEWVARIRSKYNNY |
| | LC_Q46K_ | | ATYYADSVKGRFTISRDDSKNTAYLQMNNLKTEDTAVYYCVRHGNFGNSYVSWWAYWG |
| | G141S-VH | | QGTLVTVSS |
| 801 | F12Q_HC_Q46D_ | artificial | QTVVTQEPSLTVSPGGTVTLTCGSSTGAVTSGNYPNWVQKKPGQAPRGLIGGTKFLAP |
| | LC_Q46K_ | | GTPARFSGSLLGGKAALTLSGVQPEDEAEYYCVLWYSNRWVFGSGTKLTVL |
| | G141S-VL | | |
| 802 | F12Q_HC_Q46D_ | artificial | EVQLVESGGGLVQPGGSLKLSCAASGFTFNSYAMNWVRDAPGKGLEWVARIRSKYNNY |
| | LC_Q46R- | | ATYYADSVKGRFTISRDDSKNTAYLQMNNLKTEDTAVYYCVRHGNFGNSYVSWWAYWG |
| | VH | | QGTLVTVSS |
| 803 | F12Q_HC_Q46D_ | artificial | QTVVTQEPSLTVSPGGTVTLTCGSSTGAVTSGNYPNWVQRKPGQAPRGLIGGTKFLAP |
| | LC_Q46R- | | GTPARFSGSLLGGKAALTLSGVQPEDEAEYYCVLWYSNRWVFGGGTKLTVL |
| | VL | | |
| 804 | F12Q_HC_Q46D_ | artificial | EVQLVESGGGLVQPGGSLKLSCAASGFTFNSYAMNWVRDAPGKGLEWVARIRSKYNNY |
| | LC_Q46R_ | | ATYYADSVKGRFTISRDDSKNTAYLQMNNLKTEDTAVYYCVRHGNFGNSYVSWWAYWG |
| | G141S-VH | | QGTLVTVSS |
| 805 | F12Q_HC_Q46D_ | artificial | QTVVTQEPSLTVSPGGTVTLTCGSSTGAVTSGNYPNWVQRKPGQAPRGLIGGTKFLAP |
| | LC_Q46R_ | | GTPARFSGSLLGGKAALTLSGVQPEDEAEYYCVLWYSNRWVFGSGTKLTVL |
| | G141S-VL | | |
| 806 | F12Q_HC_Q46E- | artificial | EVQLVESGGGLVQPGGSLKLSCAASGFTFNSYAMNWVREAPGKGLEWVARIRSKYNNY |
| | VH | | ATYYADSVKGRFTISRDDSKNTAYLQMNNLKTEDTAVYYCVRHGNFGNSYVSWWAYWG |
| | | | QGTLVTVSS |
| 807 | F12Q_HC_Q46E- | artificial | QTVVTQEPSLTVSPGGTVTLTCGSSTGAVTSGNYPNWVQQKPGQAPRGLIGGTKFLAP |
| | VL | | GTPARFSGSLLGGKAALTLSGVQPEDEAEYYCVLWYSNRWVFGGGTKLTVL |
| 808 | F12Q_HC_Q46E_ | artificial | EVQLVESGGGLVQPGGSLKLSCAASGFTFNSYAMNWVREAPGKGLEWVARIRSKYNNY |
| | LC_L21I_ | | ATYYADSVKGRFTISRDDSKNTAYLQMNNLKTEDTAVYYCVRHGNFGNSYVSWWAYWG |
| | Q46K_G141S- | | QGTLVTVSS |
| | VH | | |
| 809 | F12Q_HC_Q46E_ | artificial | QTVVTQEPSLTVSPGGTVTITCGSSTGAVTSGNYPNWVQKKPGQAPRGLIGGTKFLAP |
| | LC_L21I_ | | GTPARFSGSLLGGKAALTLSGVQPEDEAEYYCVLWYSNRWVFGSGTKLTVL |
| | Q46K_G141S- | | |
| | VL | | |
| 810 | F12Q_HC_Q46E_ | artificial | EVQLVESGGGLVQPGGSLKLSCAASGFTFNSYAMNWVREAPGKGLEWVARIRSKYNNY |
| | LC_L21I_ | | ATYYADSVKGRFTISRDDSKNTAYLQMNNLKTEDTAVYYCVRHGNFGNSYVSWWAYWG |
| | Q46R_G141S- | | QGTLVTVSS |
| | VH | | |
| 811 | F12Q_HC_Q46E_ | artificial | QTVVTQEPSLTVSPGGTVTITCGSSTGAVTSGNYPNWVQRKPGQAPRGLIGGTKFLAP |
| | LC_L21I_ | | GTPARFSGSLLGGKAALTLSGVQPEDEAEYYCVLWYSNRWVFGSGTKLTVL |
| | Q46R_G141S- | | |
| | VL | | |
| 812 | F12Q_HC_Q46E_ | artificial | EVQLVESGGGLVQPGGSLKLSCAASGFTENSYAMNWVREAPGKGLEWVARIRSKYNNY |
| | LC_Q46K- | | ATYYADSVKGRFTISRDDSKNTAYLQMNNLKTEDTAVYYCVRHGNFGNSYVSWWAYWG |
| | VH | | QGTLVTVSS |
| 813 | F12Q_HC_Q46E_ | artificial | QTVVTQEPSLTVSPGGTVTLTCGSSTGAVTSGNYPNWVQKKPGQAPRGLIGGTKFLAP |
| | LC_Q46K- | | GTPARFSGSLLGGKAALTLSGVQPEDEAEYYCVLWYSNRWVFGGGTKLTVL |
| | VL | | |
| 814 | F12Q_HC_Q46E_ | artificial | EVQLVESGGGLVQPGGSLKLSCAASGFTENSYAMNWVREAPGKGLEWVARIRSKYNNY |
| | LC_Q46K_ | | ATYYADSVKGRFTISRDDSKNTAYLQMNNLKTEDTAVYYCVRHGNFGNSYVSWWAYWG |
| | G141S-VH | | QGTLVTVSS |
| 815 | F12Q_HC_Q46E_ | artificial | QTVVTQEPSLTVSPGGTVTLTCGSSTGAVTSGNYPNWVQKKPGQAPRGLIGGTKFLAP |
| | LC_Q46K_ | | GTPARFSGSLLGGKAALTLSGVQPEDEAEYYCVLWYSNRWVFGSGTKLTVL |
| | G141S-VL | | |
| 816 | F12Q_HC_Q46E_ | artificial | EVQLVESGGGLVQPGGSLKLSCAASGFTFNSYAMNWVREAPGKGLEWVARIRSKYNNY |
| | LC_Q46R- | | ATYYADSVKGRFTISRDDSKNTAYLQMNNLKTEDTAVYYCVRHGNFGNSYVSWWAYWG |
| | VH | | QGTLVTVSS |
| 817 | F12Q_HC_Q46E_ | artificial | QTVVTQEPSLTVSPGGTVTLTCGSSTGAVTSGNYPNWVQRKPGQAPRGLIGGTKFLAP |
| | LC_Q46R- | | GTPARFSGSLLGGKAALTLSGVQPEDEAEYYCVLWYSNRWVFGGGTKLTVL |
| | VL | | |
| 818 | F12Q_HC_Q46E_ | artificial | EVQLVESGGGLVQPGGSLKLSCAASGFTFNSYAMNWVREAPGKGLEWVARIRSKYNNY |
| | LC_Q46R_ | | ATYYADSVKGRFTISRDDSKNTAYLQMNNLKTEDTAVYYCVRHGNFGNSYVSWWAYWG |
| | G141S-VH | | QGTLVTVSS |
| 819 | F12Q_HC_Q46E_ | artificial | QTVVTQEPSLTVSPGGTVTLTCGSSTGAVTSGNYPNWVQRKPGQAPRGLIGGTKFLAP |
| | LC_Q46R_ | | GTPARFSGSLLGGKAALTLSGVQPEDEAEYYCVLWYSNRWVFGSGTKLTVL |
| | G141S-VL | | |
| 820 | F12Q_HC_Q46K- | artificial | EVQLVESGGGLVQPGGSLKLSCAASGFTFNSYAMNWVRKAPGKGLEWVARIRSKYNNY |
| | VH | | ATYYADSVKGRFTISRDDSKNTAYLQMNNLKTEDTAVYYCVRHGNFGNSYVSWWAYWG |
| | | | QGTLVTVSS |
| 821 | F12Q_HC_Q46K- | artificial | QTVVTQEPSLTVSPGGTVTLTCGSSTGAVTSGNYPNWVQQKPGQAPRGLIGGTKFLAP |
| | VL | | GTPARFSGSLLGGKAALTLSGVQPEDEAEYYCVLWYSNRWVFGGGTKLTVL |
| 822 | F12Q_HC_Q46R- | artificial | EVQLVESGGGLVQPGGSLKLSCAASGFTFNSYAMNWVRRAPGKGLEWVARIRSKYNNY |
| | VH | | ATYYADSVKGRFTISRDDSKNTAYLQMNNLKTEDTAVYYCVRHGNFGNSYVSWWAYWG |
| | | | QGTLVTVSS |
| 823 | F12Q_HC_Q46R- | artificial | QTVVTQEPSLTVSPGGTVTLTCGSSTGAVTSGNYPNWVQQKPGQAPRGLIGGTKFLAP |
| | VL | | GTPARFSGSLLGGKAALTLSGVQPEDEAEYYCVLWYSNRWVFGGGTKLTVL |
| 824 | F12Q_HC_V107A- | artificial | EVQLVESGGGLVQPGGSLKLSCAASGFTFNSYAMNWVRQAPGKGLEWVARIRSKYNNY |
| | VH | | ATYYADSVKGRFTISRDDSKNTAYLQMNNLKTEDTAVYYCARHGNFGNSYVSWWAYWG |
| | | | QGTLVTVSS |
| 825 | F12Q_HC_V107A- | artificial | QTVVTQEPSLTVSPGGTVTLTCGSSTGAVTSGNYPNWVQQKPGQAPRGLIGGTKFLAP |
| | VL | | GTPARFSGSLLGGKAALTLSGVQPEDEAEYYCVLWYSNRWVFGGGTKLTVL |
| 826 | F12Q_HC_V107L- | artificial | EVQLVESGGGLVQPGGSLKLSCAASGFTFNSYAMNWVRQAPGKGLEWVARIRSKYNNY |
| | VH | | ATYYADSVKGRFTISRDDSKNTAYLQMNNLKTEDTAVYYCLRHGNFGNSYVSWWAYWG |
| | | | QGTLVTVSS |
| 827 | F12Q_HC_V107L- | artificial | QTVVTQEPSLTVSPGGTVTLTCGSSTGAVTSGNYPNWVQQKPGQAPRGLIGGTKFLAP |
| | VL | | GTPARFSGSLLGGKAALTLSGVQPEDEAEYYCVLWYSNRWVFGGGTKLTVL |
| 828 | F12Q_HC_W136F- | artificial | SYAMN |
| | HCDR1 | | |
| 829 | F12Q_HC_W136F- | artificial | RIRSKYNNYATYYADSVKG |
| | HCDR2 | | |
| 830 | F12Q_HC_W136F- | artificial | HGNFGNSYVSWFAY |
| | HCDR3 | | |
| 831 | F12Q_HC_W136F- | artificial | GSSTGAVTSGNYPN |
| | LCDR1 | | |
| 832 | F12Q_HC_W136F- | artificial | GTKFLAP |
| | LCDR2 | | |
| 833 | F12Q_HC_W136F- | artificial | VLWYSNRWV |
| | LCDR3 | | |
| 834 | F12Q_HC_W136F- | artificial | EVQLVESGGGLVQPGGSLKLSCAASGFTENSYAMNWVRQAPGKGLEWVARIRSKYNNY |
| | VH | | ATYYADSVKGRFTISRDDSKNTAYLQMNNLKTEDTAVYYCVRHGNFGNSYVSWFAYWG |
| | | | QGTLVTVSS |
| 835 | F12Q_HC_W136F- | artificial | QTVVTQEPSLTVSPGGTVTLTCGSSTGAVTSGNYPNWVQQKPGQAPRGLIGGTKFLAP |
| | VL | | GTPARFSGSLLGGKAALTLSGVQPEDEAEYYCVLWYSNRWVFGGGTKLTVL |
| 836 | F12Q_HC_W136F_ | artificial | EVQLVESGGGLVQPGGSLKLSCAASGFTFNSYAMNWVRQAPGKGLEWVARIRSKYNNY |
| | LC_V44I | | ATYYADSVKGRFTISRDDSKNTAYLQMNNLKTEDTAVYYCVRHGNFGNSYVSWFAYWG |
| | -VH | | QGTLVTVSS |
| 837 | F12Q_HC_W136F_ | artificial | QTVVTQEPSLTVSPGGTVTLTCGSSTGAVTSGNYPNWIQQKPGQAPRGLIGGTKFLAP |
| | LC_V44I | | GTPARFSGSLLGGKAALTLSGVQPEDEAEYYCVLWYSNRWVFGGGTKLTVL |
| | -VL | | |
| 838 | F12Q_HC_W136F_ | artificial | EVQLVESGGGLVQPGGSLKLSCAASGFTENSYAMNWVRQAPGKGLEWVARIRSKYNNY |
| | LC_V44L | | ATYYADSVKGRFTISRDDSKNTAYLQMNNLKTEDTAVYYCVRHGNFGNSYVSWFAYWG |
| | -VH | | QGTLVTVSS |
| 839 | F12Q_HC_W136F_ | artificial | QTVVTQEPSLTVSPGGTVTLTCGSSTGAVTSGNYPNWLQQKPGQAPRGLIGGTKFLAP |
| | LC_V44L | | GTPARFSGSLLGGKAALTLSGVQPEDEAEYYCVLWYSNRWVFGGGTKLTVL |
| | -VL | | |
| 840 | F12Q_I2E- | artificial | SYAIN |
| | HCDR1 | | |
| 841 | F12Q_I2E- | artificial | RIRSKYNNYATYYADAVKG |
| | HCDR2 | | |
| 842 | F12Q_I2E- | artificial | AGNFGSSYVSWWAY |
| | HCDR3 | | |
| 843 | F12Q_I2E- | artificial | GSSTGAVTSGNYPN |
| | LCDR1 | | |
| 844 | F12Q_I2E- | artificial | GTKFLAP |
| | LCDR2 | | |
| 845 | F12Q_I2E- | artificial | VLWYSNRWV |
| | LCDR3 | | |
| 846 | F12Q_I2E- | artificial | EVQLVESGGGLVQPGGSLKLSCAASGFTFNSYAINWVRQAPGKGLEWVARIRSKYNNY |
| | VH | | ATYYADAVKGRFTISRDDSKNTVYLQMNNLKTEDTAVYYCARAGNFGSSYVSWWAYWG |
| | | | QGTLVTVSS |
| 847 | F12Q_I2E- | artificial | QTVVTQEPSLTVSPGGTVTITCGSSTGAVTSGNYPNWVQKKPGQAPRGLIGGTKFLAP |
| | VL | | GTPARFSGSLSGGKAALTLSGVQPEDEAEYYCVLWYSNRWVFGSGTKLTVL |
| 848 | F12Q_I2K- | artificial | SYAMN |
| | HCDR1 | | |
| 849 | F12Q_I2K- | artificial | RIRSKYNNYATYYAEAVKG |
| | HCDR2 | | |
| 850 | F12Q_I2K- | artificial | NENIGTSYVSWWAY |
| | HCDR3 | | |
| 851 | F12Q_I2K- | artificial | GSSTGAVTSGNYPN |
| | LCDR1 | | |
| 852 | F12Q_I2K- | artificial | GTKFLAP |
| | LCDR2 | | |
| 853 | F12Q_I2K- | artificial | VLWYSNRWV |
| | LCDR3 | | |
| 854 | F12Q_I2K- | artificial | EVQLVESGGGLVQPGGSLKLSCAASGFTFNSYAMNWVRQAPGKGLEWVARIRSKYNNY |
| | VH | | ATYYAEAVKGRFTISRDDSKNTVYLQMNNLKTEDTAVYYCVRNENIGTSYVSWWAYWG |
| | | | QGTLVTVSS |
| 855 | F12Q_I2K- | artificial | QTVVTQEPSLTVSPGGTVTITCGSSTGAVTSGNYPNWVQQKPGQAPRGLIGGTKFLAP |
| | VL | | GTPARFSGSLSGGKAALTLSGVQPEDEAEYYCVLWYSNRWVFGSGTKLTVL |
| 856 | F12Q_I2L- | artificial | SYAMN |
| | HCDR1 | | |
| 857 | F12Q_I2L- | artificial | RIRSKYNNYATYYADAVKG |
| | HCDR2 | | |
| 858 | F12Q_I2L- | artificial | AGNFGSSYVSWFAY |
| | HCDR3 | | |
| 859 | F12Q_I2L- | artificial | GSSTGAVTSGNYPN |
| | LCDR1 | | |
| 860 | F12Q_I2L- | artificial | GTKFLAP |
| | LCDR2 | | |
| 861 | F12Q_I2L- | artificial | VLYYSNRWV |
| | LCDR3 | | |
| 862 | F12Q_I2L- | artificial | EVQLVESGGGLVQPGGSLKLSCAASGFTFNSYAMNWVRQAPGKGMEWVARIRSKYNNY |
| | VH | | ATYYADAVKGRFTISRDDSKNTLYLQMNNLKTEDTAVYYCVRAGNFGSSYVSWFAYWG |
| | | | QGTLVTVSS |
| 863 | F12Q_I2L- | artificial | QTVVTQEPSLTVSPGGTVTITCGSSTGAVTSGNYPNWIQKKPGQAPRGLIGGTKFLAP |
| | VL | | GTPARFSGSLEGGKAALTLSGVQPEDEAEYYCVLYYSNRWVFGSGTKLTVL |
| 864 | F12Q_I2M- | artificial | SYAMN |
| | HCDR1 | | |
| 865 | F12Q_I2M- | artificial | RIRSKYNNYATYYADAVKG |
| | HCDR2 | | |
| 866 | F12Q_I2M- | artificial | AGNFGTSYVSWWAY |
| | HCDR3 | | |
| 867 | F12Q_I2M- | artificial | GSSTGAVTSGNYPN |
| | LCDR1 | | |
| 868 | F12Q_I2M- | artificial | GTKFLAP |
| | LCDR2 | | |
| 869 | F12Q_I2M- | artificial | VLWYSNRWV |
| | LCDR3 | | |
| 870 | F12Q_I2M- | artificial | EVQLVESGGGLVQPGGSLKLSCAASGFTFNSYAMNWVRQAPGKGMEWVARIRSKYNNY |
| | VH | | ATYYADAVKGRFTISRDDSKNTLYLQMNNLKTEDTAVYYCVRAGNFGTSYVSWWAYWG |
| | | | QGTLVTVSS |
| 871 | F12Q_I2M- | artificial | QTVVTQEPSLTVSPGGTVTITCGSSTGAVTSGNYPNWVQKKPGQAPRGLIGGTKFLAP |
| | VL | | GTPARFSGSLSGGKAALTLSGVQPEDEAEYYCVLWYSNRWVFGSGTKLTVL |
| 872 | F12Q_I2M2- | artificial | SYAIN |
| | HCDR1 | | |
| 873 | F12Q_I2M2- | artificial | RIRSKYNNYATYYADAVKG |
| | HCDR2 | | |
| 874 | F12Q_I2M2- | artificial | NANFGTSYVSWFAY |
| | HCDR3 | | |
| 875 | F12Q_I2M2- | artificial | GSSTGAVTSGNYPN |
| | LCDR1 | | |
| 876 | F12Q_I2M2- | artificial | GTKFLAP |
| | LCDR2 | | |
| 877 | F12Q_I2M2- | artificial | VLWYSNRWV |
| | LCDR3 | | |
| 878 | F12Q_I2M2- | artificial | EVQLVESGGGLVQPGGSLKLSCAASGFTENSYAINWVREAPGKGLEWVARIRSKYNNY |
| | VH | | ATYYADAVKGRFTISRDDSKNTAYLQMNNLKTEDTAVYYCVRNANFGTSYVSWFAYWG |
| | | | QGTLVTVSS |
| 879 | F12Q_I2M2- | artificial | QTVVTQEPSLTVSPGGTVTLTCGSSTGAVTSGNYPNWVQKKPGQAPRGLIGGTKFLAP |
| | VL | | GTPARFSGSLLGGKAALTLSGVQPEDEAEYYCVLWYSNRWVFGSGTKLTVL |
| 880 | F12Q_LC_G141S- | artificial | EVQLVESGGGLVQPGGSLKLSCAASGFTFNSYAMNWVRQAPGKGLEWVARIRSKYNNY |
| | VH | | ATYYADSVKGRFTISRDDSKNTAYLQMNNLKTEDTAVYYCVRHGNFGNSYVSWWAYWG |
| | | | QGTLVTVSS |
| 881 | F12Q_LC_G141S- | artificial | QTVVTQEPSLTVSPGGTVTLTCGSSTGAVTSGNYPNWVQQKPGQAPRGLIGGTKFLAP |
| | VL | | GTPARFSGSLLGGKAALTLSGVQPEDEAEYYCVLWYSNRWVFGSGTKLTVL |
| 882 | F12Q_LC_G141S_ | artificial | EVQLVESGGGLVQPGGSLKLSCAASGFTFNSYAMNWVRQAPGKGLEWVARIRSKYNNY |
| | L21I- | | ATYYADSVKGRFTISRDDSKNTAYLQMNNLKTEDTAVYYCVRHGNFGNSYVSWWAYWG |
| | VH | | QGTLVTVSS |
| 883 | F12Q_LC_G141S_ | artificial | QTVVTQEPSLTVSPGGTVTITCGSSTGAVTSGNYPNWVQQKPGQAPRGLIGGTKFLAP |
| | L21I- | | GTPARFSGSLLGGKAALTLSGVQPEDEAEYYCVLWYSNRWVFGSGTKLTVL |
| | VL | | |
| 884 | F12Q_LC_L83E- | artificial | EVQLVESGGGLVQPGGSLKLSCAASGFTFNSYAMNWVRQAPGKGLEWVARIRSKYNNY |
| | VH | | ATYYADSVKGRFTISRDDSKNTAYLQMNNLKTEDTAVYYCVRHGNFGNSYVSWWAYWG |
| | | | QGTLVTVSS |
| 885 | F12Q_LC_L83E- | artificial | QTVVTQEPSLTVSPGGTVTLTCGSSTGAVTSGNYPNWVQQKPGQAPRGLIGGTKFLAP |
| | VL | | GTPARFSGSLEGGKAALTLSGVQPEDEAEYYCVLWYSNRWVFGGGTKLTVL |
| 886 | F12Q_LC_L83S- | artificial | EVQLVESGGGLVQPGGSLKLSCAASGFTENSYAMNWVRQAPGKGLEWVARIRSKYNNY |
| | VH | | ATYYADSVKGRFTISRDDSKNTAYLQMNNLKTEDTAVYYCVRHGNFGNSYVSWWAYWG |
| | | | QGTLVTVSS |
| 887 | F12Q_LC_L83S- | artificial | QTVVTQEPSLTVSPGGTVTLTCGSSTGAVTSGNYPNWVQQKPGQAPRGLIGGTKFLAP |
| | VL | | GTPARFSGSLSGGKAALTLSGVQPEDEAEYYCVLWYSNRWVFGGGTKLTVL |
| 888 | F12Q_LC_Q46E- | artificial | EVQLVESGGGLVQPGGSLKLSCAASGFTENSYAMNWVRQAPGKGLEWVARIRSKYNNY |
| | VH | | ATYYADSVKGRFTISRDDSKNTAYLQMNNLKTEDTAVYYCVRHGNFGNSYVSWWAYWG |
| | | | QGTLVTVSS |
| 889 | F12Q_LC_Q46E- | artificial | QTVVTQEPSLTVSPGGTVTLTCGSSTGAVTSGNYPNWVQEKPGQAPRGLIGGTKFLAP |
| | VL | | GTPARFSGSLLGGKAALTLSGVQPEDEAEYYCVLWYSNRWVFGGGTKLTVL |
| 890 | F12Q_LC_Q46K- | artificial | EVQLVESGGGLVQPGGSLKLSCAASGFTFNSYAMNWVRQAPGKGLEWVARIRSKYNNY |
| | VH | | ATYYADSVKGRFTISRDDSKNTAYLQMNNLKTEDTAVYYCVRHGNFGNSYVSWWAYWG |
| | | | QGTLVTVSS |
| 891 | F12Q_LC_Q46K- | artificial | QTVVTQEPSLTVSPGGTVTLTCGSSTGAVTSGNYPNWVQKKPGQAPRGLIGGTKFLAP |
| | VL | | GTPARFSGSLLGGKAALTLSGVQPEDEAEYYCVLWYSNRWVFGGGTKLTVL |
| 892 | F12Q_LC_V107A- | artificial | SYAMN |
| | HCDR1 | | |
| 893 | F12Q_LC_V107A- | artificial | RIRSKYNNYATYYADSVKG |
| | HCDR2 | | |
| 894 | F12Q_LC_V107A- | artificial | HGNFGNSYVSWWAY |
| | HCDR3 | | |
| 895 | F12Q_LC_V107A- | artificial | GSSTGAVTSGNYPN |
| | LCDR1 | | |
| 896 | F12Q_LC_V107A- | artificial | GTKFLAP |
| | LCDR2 | | |
| 897 | F12Q_LC_V107A- | artificial | ALWYSNRWV |
| | LCDR3 | | |
| 898 | F12Q_LC_V107A- | artificial | EVQLVESGGGLVQPGGSLKLSCAASGFTFNSYAMNWVRQAPGKGLEWVARIRSKYNNY |
| | VH | | ATYYADSVKGRFTISRDDSKNTAYLQMNNLKTEDTAVYYCVRHGNFGNSYVSWWAYWG |
| | | | QGTLVTVSS |
| 899 | F12Q_LC_V107A- | artificial | QTVVTQEPSLTVSPGGTVTLTCGSSTGAVTSGNYPNWVQQKPGQAPRGLIGGTKFLAP |
| | VL | | GTPARFSGSLLGGKAALTLSGVQPEDEAEYYCALWYSNRWVFGGGTKLTVL |
| 900 | F12Q_LC_V107L- | artificial | SYAMN |
| | HCDR1 | | |
| 901 | F12Q_LC_V107L- | artificial | RIRSKYNNYATYYADSVKG |
| | HCDR2 | | |
| 902 | F12Q_LC_V107L- | artificial | HGNFGNSYVSWWAY |
| | HCDR3 | | |
| 903 | F12Q_LC_V107L- | artificial | GSSTGAVTSGNYPN |
| | LCDR1 | | |
| 904 | F12Q_LC_V107L- | artificial | GTKFLAP |
| | LCDR2 | | |
| 905 | F12Q_LC_V107L- | artificial | LLWYSNRWV |
| | LCDR3 | | |
| 906 | F12Q_LC_V107L- | artificial | EVQLVESGGGLVQPGGSLKLSCAASGFTFNSYAMNWVRQAPGKGLEWVARIRSKYNNY |
| | VH | | ATYYADSVKGRFTISRDDSKNTAYLQMNNLKTEDTAVYYCVRHGNFGNSYVSWWAYWG |
| | | | QGTLVTVSS |
| 907 | F12Q_LC_V107L- | artificial | QTVVTQEPSLTVSPGGTVTLTCGSSTGAVTSGNYPNWVQQKPGQAPRGLIGGTKFLAP |
| | VL | | GTPARFSGSLLGGKAALTLSGVQPEDEAEYYCLLWYSNRWVFGGGTKLTVL |
| 908 | F12Q_LC_V44I- | artificial | EVQLVESGGGLVQPGGSLKLSCAASGFTENSYAMNWVRQAPGKGLEWVARIRSKYNNY |
| | VH | | ATYYADSVKGRFTISRDDSKNTAYLQMNNLKTEDTAVYYCVRHGNFGNSYVSWWAYWG |
| | | | QGTLVTVSS |
| 909 | F12Q_LC_V44I- | artificial | QTVVTQEPSLTVSPGGTVTLTCGSSTGAVTSGNYPNWIQQKPGQAPRGLIGGTKFLAP |
| | VL | | GTPARFSGSLLGGKAALTLSGVQPEDEAEYYCVLWYSNRWVFGGGTKLTVL |
| 910 | F12Q_LC_V44L- | artificial | EVQLVESGGGLVQPGGSLKLSCAASGFTFNSYAMNWVRQAPGKGLEWVARIRSKYNNY |
| | VH | | ATYYADSVKGRFTISRDDSKNTAYLQMNNLKTEDTAVYYCVRHGNFGNSYVSWWAYWG |
| | | | QGTLVTVSS |
| 911 | F12Q_LC_V44L- | artificial | QTVVTQEPSLTVSPGGTVTLTCGSSTGAVTSGNYPNWLQQKPGQAPRGLIGGTKFLAP |
| | VL | | GTPARFSGSLLGGKAALTLSGVQPEDEAEYYCVLWYSNRWVFGGGTKLTVL |
| 912 | F12Q_LC_V44M- | artificial | EVQLVESGGGLVQPGGSLKLSCAASGFTENSYAMNWVRQAPGKGLEWVARIRSKYNNY |
| | VH | | ATYYADSVKGRFTISRDDSKNTAYLQMNNLKTEDTAVYYCVRHGNFGNSYVSWWAYWG |
| | | | QGTLVTVSS |
| 913 | F12Q_LC_V44M- | artificial | QTVVTQEPSLTVSPGGTVTLTCGSSTGAVTSGNYPNWMQQKPGQAPRGLIGGTKFLAP |
| | VL | | GTPARFSGSLLGGKAALTLSGVQPEDEAEYYCVLWYSNRWVFGGGTKLTVL |
| 914 | F12Q_LC_W109Y- | artificial | SYAMN |
| | HCDR1 | | |
| 915 | F12Q_LC_W109Y- | artificial | RIRSKYNNYATYYADSVKG |
| | HCDR2 | | |
| 916 | F12Q_LC_W109Y- | artificial | HGNFGNSYVSWWAY |
| | HCDR3 | | |
| 917 | F12Q_LC_W109Y- | artificial | GSSTGAVTSGNYPN |
| | LCDR1 | | |
| 918 | F12Q_LC_W109Y- | artificial | GTKFLAP |
| | LCDR2 | | |
| 919 | F12Q_LC_W109Y- | artificial | VLYYSNRWV |
| | LCDR3 | | |
| 920 | F12Q_LC_W109Y- | artificial | EVQLVESGGGLVQPGGSLKLSCAASGFTFNSYAMNWVRQAPGKGLEWVARIRSKYNNY |
| | VH | | ATYYADSVKGRFTISRDDSKNTAYLQMNNLKTEDTAVYYCVRHGNFGNSYVSWWAYWG |
| | | | QGTLVTVSS |
| 921 | F12Q_LC_W109Y- | artificial | QTVVTQEPSLTVSPGGTVTLTCGSSTGAVTSGNYPNWVQQKPGQAPRGLIGGTKFLAP |
| | VL | | GTPARFSGSLLGGKAALTLSGVQPEDEAEYYCVLYYSNRWVFGGGTKLTVL |
| 922 | F6A-HCDR1 | artificial | IYAMN |
| 923 | F6A-HCDR2 | artificial | RIRSKYNNYATYYADSVKS |
| 924 | F6A-HCDR3 | artificial | HGNFGNSYVSFFAY |
| 925 | F6A-LCDR1 | artificial | GSSTGAVTSGYYPN |
| 926 | F6A-LCDR2 | artificial | GTKFLAP |
| 927 | F6A-LCDR3 | artificial | ALWYSNRWV |
| 928 | F6A-VH | artificial | EVQLVESGGGLVQPGGSLKLSCAASGFTFNIYAMNWVRQAPGKGLEWVARIRSKYNNY |
| | | | ATYYADSVKSRFTISRDDSKNTAYLQMNNLKTEDTAVYYCVRHGNFGNSYVSFFAYWG |
| | | | QGTLVTVSS |
| 929 | F6A-VL | artificial | QTVVTQEPSLTVSPGGTVTLTCGSSTGAVTSGYYPNWVQQKPGQAPRGLIGGTKFLAP |
| | | | GTPARFSGSLLGGKAALTLSGVQPEDEAEYYCALWYSNRWVFGGGTKLTVL |
| 930 | F6A_HC_A89I | artificial | EVQLVESGGGLVQPGGSLKLSCAASGFTFNIYAMNWVRQAPGKGLEWVARIRSKYNNY |
| | -VH | | ATYYADSVKSRFTISRDDSKNTIYLQMNNLKTEDTAVYYCVRHGNFGNSYVSFFAYWG |
| | | | QGTLVTVSS |
| 931 | F6A_HC_A89I | artificial | QTVVTQEPSLTVSPGGTVTLTCGSSTGAVTSGYYPNWVQQKPGQAPRGLIGGTKFLAP |
| | -VL | | GTPARFSGSLLGGKAALTLSGVQPEDEAEYYCALWYSNRWVFGGGTKLTVL |
| 932 | F6A_HC_A89L | artificial | EVQLVESGGGLVQPGGSLKLSCAASGFTFNIYAMNWVRQAPGKGLEWVARIRSKYNNY |
| | -VH | | ATYYADSVKSRFTISRDDSKNTLYLQMNNLKTEDTAVYYCVRHGNFGNSYVSFFAYWG |
| | | | QGTLVTVSS |
| 933 | F6A_HC_A89L | artificial | QTVVTQEPSLTVSPGGTVTLTCGSSTGAVTSGYYPNWVQQKPGQAPRGLIGGTKFLAP |
| | -VL | | GTPARFSGSLLGGKAALTLSGVQPEDEAEYYCALWYSNRWVFGGGTKLTVL |
| 934 | F6A_HC_A89T | artificial | EVQLVESGGGLVQPGGSLKLSCAASGFTFNIYAMNWVRQAPGKGLEWVARIRSKYNNY |
| | -VH | | ATYYADSVKSRFTISRDDSKNTTYLQMNNLKTEDTAVYYCVRHGNFGNSYVSFFAYWG |
| | | | QGTLVTVSS |
| 935 | F6A_HC_A89T | artificial | QTVVTQEPSLTVSPGGTVTLTCGSSTGAVTSGYYPNWVQQKPGQAPRGLIGGTKFLAP |
| | -VL | | GTPARFSGSLLGGKAALTLSGVQPEDEAEYYCALWYSNRWVFGGGTKLTVL |
| 936 | F6A_HC_A89V | artificial | EVQLVESGGGLVQPGGSLKLSCAASGFTFNIYAMNWVRQAPGKGLEWVARIRSKYNNY |
| | -VH | | ATYYADSVKSRFTISRDDSKNTVYLQMNNLKTEDTAVYYCVRHGNFGNSYVSFFAYWG |
| | | | QGTLVTVSS |
| 937 | F6A_HC_A89V | artificial | QTVVTQEPSLTVSPGGTVTLTCGSSTGAVTSGYYPNWVQQKPGQAPRGLIGGTKFLAP |
| | -VL | | GTPARFSGSLLGGKAALTLSGVQPEDEAEYYCALWYSNRWVFGGGTKLTVL |
| 938 | F6A_HC_L52M | artificial | EVQLVESGGGLVQPGGSLKLSCAASGFTFNIYAMNWVRQAPGKGMEWVARIRSKYNNY |
| | -VH | | ATYYADSVKSRFTISRDDSKNTAYLQMNNLKTEDTAVYYCVRHGNFGNSYVSFFAYWG |
| | | | QGTLVTVSS |
| 939 | F6A_HC_L52M | artificial | QTVVTQEPSLTVSPGGTVTLTCGSSTGAVTSGYYPNWVQQKPGQAPRGLIGGTKFLAP |
| | -VL | | GTPARFSGSLLGGKAALTLSGVQPEDEAEYYCALWYSNRWVFGGGTKLTVL |
| 940 | F6A_HC_L52M_ | artificial | EVQLVESGGGLVQPGGSLKLSCAASGFTFNIYAMNWVRQAPGKGMEWVARIRSKYNNY |
| | LC_L21I_ | | ATYYADSVKSRFTISRDDSKNTAYLQMNNLKTEDTAVYYCVRHGNFGNSYVSFFAYWG |
| | Q46K_G141S- | | QGTLVTVSS |
| | VH | | |
| 941 | F6A_HC_L52M_ | artificial | QTVVTQEPSLTVSPGGTVTITCGSSTGAVTSGYYPNWVQKKPGQAPRGLIGGTKFLAP |
| | LC_L21I_ | | GTPARFSGSLLGGKAALTLSGVQPEDEAEYYCALWYSNRWVFGSGTKLTVL |
| | Q46K_G141S- | | |
| | VL | | |
| 942 | F6A_HC_L52M_ | artificial | EVQLVESGGGLVQPGGSLKLSCAASGFTFNIYAMNWVRQAPGKGMEWVARIRSKYNNY |
| | LC_Q46K- | | ATYYADSVKSRFTISRDDSKNTAYLQMNNLKTEDTAVYYCVRHGNFGNSYVSFFAYWG |
| | VH | | QGTLVTVSS |
| 943 | F6A_HC_L52M_ | artificial | QTVVTQEPSLTVSPGGTVTLTCGSSTGAVTSGYYPNWVQKKPGQAPRGLIGGTKFLAP |
| | LC_Q46K- | | GTPARFSGSLLGGKAALTLSGVQPEDEAEYYCALWYSNRWVFGGGTKLTVL |
| | VL | | |
| 944 | F6A_HC_L52M_ | artificial | EVQLVESGGGLVQPGGSLKLSCAASGFTFNIYAMNWVRQAPGKGMEWVARIRSKYNNY |
| | LC_Q46K_ | | ATYYADSVKSRFTISRDDSKNTAYLQMNNLKTEDTAVYYCVRHGNFGNSYVSFFAYWG |
| | G141S-VH | | QGTLVTVSS |
| 945 | F6A_HC_L52M_ | artificial | QTVVTQEPSLTVSPGGTVTLTCGSSTGAVTSGYYPNWVQKKPGQAPRGLIGGTKFLAP |
| | LC_Q46K_ | | GTPARFSGSLLGGKAALTLSGVQPEDEAEYYCALWYSNRWVFGSGTKLTVL |
| | G141S-VL | | |
| 946 | F6A_HC_L52V | artificial | EVQLVESGGGLVQPGGSLKLSCAASGFTFNIYAMNWVRQAPGKGVEWVARIRSKYNNY |
| | -VH | | ATYYADSVKSRFTISRDDSKNTAYLQMNNLKTEDTAVYYCVRHGNFGNSYVSFFAYWG |
| | | | QGTLVTVSS |
| 947 | F6A_HC_L52V | artificial | QTVVTQEPSLTVSPGGTVTLTCGSSTGAVTSGYYPNWVQQKPGQAPRGLIGGTKFLAP |
| | -VL | | GTPARFSGSLLGGKAALTLSGVQPEDEAEYYCALWYSNRWVFGGGTKLTVL |
| 948 | F6A_HC_L52V | artificial | EVQLVESGGGLVQPGGSLKLSCAASGFTFNIYAMNWVRQAPGKGVEWVARIRSKYNNY |
| | LC_V44F- | | ATYYADSVKSRFTISRDDSKNTAYLQMNNLKTEDTAVYYCVRHGNFGNSYVSFFAYWG |
| | VH | | QGTLVTVSS |
| 949 | F6A_HC_L52V_ | artificial | QTVVTQEPSLTVSPGGTVTLTCGSSTGAVTSGYYPNWFQQKPGQAPRGLIGGTKFLAP |
| | LC_V44F- | | GTPARFSGSLLGGKAALTLSGVQPEDEAEYYCALWYSNRWVFGGGTKLTVL |
| | VL | | |
| 950 | F6A_HC_L52V_ | artificial | EVQLVESGGGLVQPGGSLKLSCAASGFTFNIYAMNWVRQAPGKGVEWVARIRSKYNNY |
| | LC_V44Y- | | ATYYADSVKSRFTISRDDSKNTAYLQMNNLKTEDTAVYYCVRHGNFGNSYVSFFAYWG |
| | VH | | QGTLVTVSS |
| 951 | F6A_HC_L52V_ | artificial | QTVVTQEPSLTVSPGGTVTLTCGSSTGAVTSGYYPNWYQQKPGQAPRGLIGGTKFLAP |
| | LC_V44Y- | | GTPARFSGSLLGGKAALTLSGVQPEDEAEYYCALWYSNRWVFGGGTKLTVL |
| | VL | | |
| 952 | F6A_HC_M41F_ | artificial | IYAFN |
| | A89V- | | |
| | HCDR1 | | |
| 953 | F6A_HC_M41F_ | artificial | RIRSKYNNYATYYADSVKS |
| | A89V- | | |
| | HCDR2 | | |
| 954 | F6A_HC_M41F_ | artificial | HGNFGNSYVSFFAY |
| | A89V- | | |
| | HCDR3 | | |
| 955 | F6A_HC_M41F_ | artificial | GSSTGAVTSGYYPN |
| | A89V- | | |
| | LCDR1 | | |
| 956 | F6A_HC_M41F_ | artificial | GTKFLAP |
| | A89V-LCDR2 | | |
| 957 | F6A_HC_M41F_ | artificial | ALWYSNRWV |
| | A89V-LCDR3 | | |
| 958 | F6A_HC_M41F_ | artificial | EVQLVESGGGLVQPGGSLKLSCAASGFTFNIYAFNWVRQAPGKGLEWVARIRSKYNNY |
| | A89V-VH | | ATYYADSVKSRFTISRDDSKNTVYLQMNNLKTEDTAVYYCVRHGNFGNSYVSFFAYWG |
| | | | QGTLVTVSS |
| 959 | F6A_HC_M41F_ | artificial | QTVVTQEPSLTVSPGGTVTLTCGSSTGAVTSGYYPNWVQQKPGQAPRGLIGGTKFLAP |
| | A89V-VL | | GTPARFSGSLLGGKAALTLSGVQPEDEAEYYCALWYSNRWVFGGGTKLTVL |
| 960 | F6A_HC_M41I | artificial | IYAIN |
| | -HCDR1 | | |
| 961 | F6A_HC_M41I | artificial | RIRSKYNNYATYYADSVKS |
| | -HCDR2 | | |
| 962 | F6A_HC_M41I | artificial | HGNFGNSYVSFFAY |
| | -HCDR3 | | |
| 963 | F6A_HC_M41I | artificial | GSSTGAVTSGYYPN |
| | -LCDR1 | | |
| 964 | F6A_HC_M41I | artificial | GTKFLAP |
| | -LCDR2 | | |
| 965 | F6A_HC_M41I | artificial | ALWYSNRWV |
| | -LCDR3 | | |
| 966 | F6A_HC_M41I | artificial | EVQLVESGGGLVQPGGSLKLSCAASGFTFNIYAINWVRQAPGKGLEWVARIRSKYNNY |
| | -VH | | ATYYADSVKSRFTISRDDSKNTAYLQMNNLKTEDTAVYYCVRHGNFGNSYVSFFAYWG |
| | | | QGTLVTVSS |
| 967 | F6A_HC_M41I | artificial | QTVVTQEPSLTVSPGGTVTLTCGSSTGAVTSGYYPNWVQQKPGQAPRGLIGGTKFLAP |
| | -VL | | GTPARFSGSLLGGKAALTLSGVQPEDEAEYYCALWYSNRWVFGGGTKLTVL |
| 968 | F6A_HC_M41I_ | artificial | EVQLVESGGGLVQPGGSLKLSCAASGFTFNIYAINWVRQAPGKGLEWVARIRSKYNNY |
| | A89L-VH | | ATYYADSVKSRFTISRDDSKNTLYLQMNNLKTEDTAVYYCVRHGNFGNSYVSFFAYWG |
| | | | QGTLVTVSS |
| 969 | F6A_HC_M41I_ | artificial | QTVVTQEPSLTVSPGGTVTLTCGSSTGAVTSGYYPNWVQQKPGQAPRGLIGGTKFLAP |
| | A89L-VL | | GTPARFSGSLLGGKAALTLSGVQPEDEAEYYCALWYSNRWVFGGGTKLTVL |
| 970 | F6A_HC_M41I_ | artificial | EVQLVESGGGLVQPGGSLKLSCAASGFTFNIYAINWVRQAPGKGLEWVARIRSKYNNY |
| | A89V-VH | | ATYYADSVKSRFTISRDDSKNTVYLQMNNLKTEDTAVYYCVRHGNFGNSYVSFFAYWG |
| | | | QGTLVTVSS |
| 971 | F6A_HC_M41I_ | artificial | QTVVTQEPSLTVSPGGTVTLTCGSSTGAVTSGYYPNWVQQKPGQAPRGLIGGTKFLAP |
| | A89V-VL | | GTPARFSGSLLGGKAALTLSGVQPEDEAEYYCALWYSNRWVFGGGTKLTVL |
| 972 | F6A_HC_M41I_ | artificial | EVQLVESGGGLVQPGGSLKLSCAASGFTFNIYAINWVRQAPGKGLEWVARIRSKYNNY |
| | A89V_LC_ | | ATYYADSVKSRFTISRDDSKNTVYLQMNNLKTEDTAVYYCVRHGNFGNSYVSFFAYWG |
| | L21I_Q46K_ | | QGTLVTVSS |
| | G141S-VH | | |
| 973 | F6A_HC_M41I_ | artificial | QTVVTQEPSLTVSPGGTVTITCGSSTGAVTSGYYPNWVQKKPGQAPRGLIGGTKFLAP |
| | A89V_LC_ | | GTPARFSGSLLGGKAALTLSGVQPEDEAEYYCALWYSNRWVFGSGTKLTVL |
| | L21I_Q46K_ | | |
| | G141S-VL | | |
| 974 | F6A_HC_M41I_ | artificial | EVQLVESGGGLVQPGGSLKLSCAASGFTFNIYAINWVRQAPGKGLEWVARIRSKYNNY |
| | A89V_LC_ | | ATYYADSVKSRFTISRDDSKNTVYLQMNNLKTEDTAVYYCVRHGNFGNSYVSFFAYWG |
| | Q46K-VH | | QGTLVTVSS |
| 975 | F6A_HC_M41I_ | artificial | QTVVTQEPSLTVSPGGTVTLTCGSSTGAVTSGYYPNWVQKKPGQAPRGLIGGTKFLAP |
| | A89V_LC_ | | GTPARFSGSLLGGKAALTLSGVQPEDEAEYYCALWYSNRWVFGGGTKLTVL |
| | Q46K-VL | | |
| 976 | F6A_HC_M41I_ | artificial | EVQLVESGGGLVQPGGSLKLSCAASGFTFNIYAINWVRQAPGKGVEWVARIRSKYNNY |
| | L52V_A89V_ | | ATYYADSVKSRFTISRDDSKNTVYLQMNNLKTEDTAVYYCVRHGNFGNSYVSFFAYWG |
| | LC_L21I_ | | QGTLVTVSS |
| | Q46K_G141S_ | | |
| | V44F-VH | | |
| 977 | F6A_HC_M41I_ | artificial | QTVVTQEPSLTVSPGGTVTITCGSSTGAVTSGYYPNWFQKKPGQAPRGLIGGTKFLAP |
| | L52V_A89V_ | | GTPARFSGSLLGGKAALTLSGVQPEDEAEYYCALWYSNRWVFGSGTKLTVL |
| | LC_L21I_ | | |
| | Q46K_G141S_ | | |
| | V44F-VL | | |
| 978 | F6A_HC_M41I_ | artificial | EVQLVESGGGLVQPGGSLKLSCAASGFTFNIYAINWVRQAPGKGLEWVARIRSKYNNY |
| | LC_L21I_ | | ATYYADSVKSRFTISRDDSKNTAYLQMNNLKTEDTAVYYCVRHGNFGNSYVSFFAYWG |
| | Q46K_G141S- | | QGTLVTVSS |
| | VH | | |
| 979 | F6A_HC_M41I_ | artificial | QTVVTQEPSLTVSPGGTVTITCGSSTGAVTSGYYPNWVQKKPGQAPRGLIGGTKFLAP |
| | LC_L21I_ | | GTPARFSGSLLGGKAALTLSGVQPEDEAEYYCALWYSNRWVFGSGTKLTVL |
| | Q46K_G141S- | | |
| | VL | | |
| 980 | F6A_HC_M41I_ | artificial | EVQLVESGGGLVQPGGSLKLSCAASGFTFNIYAINWVREAPGKGLEWVARIRSKYNNY |
| | Q46E_A89V_ | | ATYYADSVKSRFTISRDDSKNTVYLQMNNLKTEDTAVYYCVRHGNFGNSYVSFFAYWG |
| | LC_L21I_ | | QGTLVTVSS |
| | Q46K_G141S- | | |
| | VH | | |
| 981 | F6A_HC_M41I_ | artificial | QTVVTQEPSLTVSPGGTVTITCGSSTGAVTSGYYPNWVQKKPGQAPRGLIGGTKFLAP |
| | Q46E_A89V_ | | GTPARFSGSLLGGKAALTLSGVQPEDEAEYYCALWYSNRWVFGSGTKLTVL |
| | LC_L21I_ | | |
| | Q46K_G141S- | | |
| | VL | | |
| 982 | F6A_HC_M41V | artificial | IYAVN |
| | -HCDR1 | | |
| 983 | F6A_HC_M41V | artificial | RIRSKYNNYATYYADSVKS |
| | -HCDR2 | | |
| 984 | F6A_HC_M41V | artificial | HGNFGNSYVSFFAY |
| | -HCDR3 | | |
| 985 | F6A_HC_M41V | artificial | GSSTGAVTSGYYPN |
| | -LCDR1 | | |
| 986 | F6A_HC_M41V | artificial | GTKFLAP |
| | -LCDR2 | | |
| 987 | F6A_HC_M41V | artificial | ALWYSNRWV |
| | -LCDR3 | | |
| 988 | F6A_HC_M41V | artificial | EVQLVESGGGLVQPGGSLKLSCAASGFTFNIYAVNWVRQAPGKGLEWVARIRSKYNNY |
| | -VH | | ATYYADSVKSRFTISRDDSKNTAYLQMNNLKTEDTAVYYCVRHGNFGNSYVSFFAYWG |
| | | | QGTLVTVSS |
| 989 | F6A_HC_M41V | artificial | QTVVTQEPSLTVSPGGTVTLTCGSSTGAVTSGYYPNWVQQKPGQAPRGLIGGTKFLAP |
| | -VL | | GTPARFSGSLLGGKAALTLSGVQPEDEAEYYCALWYSNRWVFGGGTKLTVL |
| 990 | F6A_HC_Q46D | artificial | EVQLVESGGGLVQPGGSLKLSCAASGFTFNIYAMNWVRDAPGKGLEWVARIRSKYNNY |
| | -VH | | ATYYADSVKSRFTISRDDSKNTAYLQMNNLKTEDTAVYYCVRHGNFGNSYVSFFAYWG |
| | | | QGTLVTVSS |
| 991 | F6A_HC_Q46D | artificial | QTVVTQEPSLTVSPGGTVTLTCGSSTGAVTSGYYPNWVQQKPGQAPRGLIGGTKFLAP |
| | -VL | | GTPARFSGSLLGGKAALTLSGVQPEDEAEYYCALWYSNRWVFGGGTKLTVL |
| 992 | F6A_HC_Q46D_ | artificial | EVQLVESGGGLVQPGGSLKLSCAASGFTFNIYAMNWVRDAPGKGLEWVARIRSKYNNY |
| | LC_L21I_ | | ATYYADSVKSRFTISRDDSKNTAYLQMNNLKTEDTAVYYCVRHGNFGNSYVSFFAYWG |
| | Q46K_G141S- | | QGTLVTVSS |
| | VH | | |
| 993 | F6A_HC_Q46D_ | artificial | QTVVTQEPSLTVSPGGTVTITCGSSTGAVTSGYYPNWVQKKPGQAPRGLIGGTKFLAP |
| | LC_L21I_ | | GTPARFSGSLLGGKAALTLSGVQPEDEAEYYCALWYSNRWVFGSGTKLTVL |
| | Q46K_G141S- | | |
| | VL | | |
| 994 | F6A_HC_Q46D_ | artificial | EVQLVESGGGLVQPGGSLKLSCAASGFTFNIYAMNWVRDAPGKGLEWVARIRSKYNNY |
| | LC_L21I_ | | ATYYADSVKSRFTISRDDSKNTAYLQMNNLKTEDTAVYYCVRHGNFGNSYVSFFAYWG |
| | Q46R_G141S- | | QGTLVTVSS |
| | VH | | |
| 995 | F6A_HC_Q46D_ | artificial | QTVVTQEPSLTVSPGGTVTITCGSSTGAVTSGYYPNWVQRKPGQAPRGLIGGTKFLAP |
| | LC_L21I_ | | GTPARFSGSLLGGKAALTLSGVQPEDEAEYYCALWYSNRWVFGSGTKLTVL |
| | Q46R_G141S- | | |
| | VL | | |
| 996 | F6A_HC_Q46D_ | artificial | EVQLVESGGGLVQPGGSLKLSCAASGFTFNIYAMNWVRDAPGKGLEWVARIRSKYNNY |
| | LC_Q46K- | | ATYYADSVKSRFTISRDDSKNTAYLQMNNLKTEDTAVYYCVRHGNFGNSYVSFFAYWG |
| | VH | | QGTLVTVSS |
| 997 | F6A_HC_Q46D_ | artificial | QTVVTQEPSLTVSPGGTVTLTCGSSTGAVTSGYYPNWVQKKPGQAPRGLIGGTKFLAP |
| | LC_Q46K- | | GTPARFSGSLLGGKAALTLSGVQPEDEAEYYCALWYSNRWVFGGGTKLTVL |
| | VL | | |
| 998 | F6A_HC_Q46D_ | artificial | EVQLVESGGGLVQPGGSLKLSCAASGFTFNIYAMNWVRDAPGKGLEWVARIRSKYNNY |
| | LC_Q46K_ | | ATYYADSVKSRFTISRDDSKNTAYLQMNNLKTEDTAVYYCVRHGNFGNSYVSFFAYWG |
| | G141S-VH | | QGTLVTVSS |
| 999 | F6A_HC_Q46D_ | artificial | QTVVTQEPSLTVSPGGTVTLTCGSSTGAVTSGYYPNWVQKKPGQAPRGLIGGTKFLAP |
| | LC_Q46K_ | | GTPARFSGSLLGGKAALTLSGVQPEDEAEYYCALWYSNRWVFGSGTKLTVL |
| | G141S-VL | | |
| 1000 | F6A_HC_Q46D_ | artificial | EVQLVESGGGLVQPGGSLKLSCAASGFTFNIYAMNWVRDAPGKGLEWVARIRSKYNNY |
| | LC_Q46R- | | ATYYADSVKSRFTISRDDSKNTAYLQMNNLKTEDTAVYYCVRHGNFGNSYVSFFAYWG |
| | VH | | QGTLVTVSS |
| 1001 | F6A_HC_Q46D_ | artificial | QTVVTQEPSLTVSPGGTVTLTCGSSTGAVTSGYYPNWVQRKPGQAPRGLIGGTKFLAP |
| | LC_Q46R- | | GTPARFSGSLLGGKAALTLSGVQPEDEAEYYCALWYSNRWVFGGGTKLTVL |
| | VL | | |
| 1002 | F6A_HC_Q46D_ | artificial | EVQLVESGGGLVQPGGSLKLSCAASGFTFNIYAMNWVRDAPGKGLEWVARIRSKYNNY |
| | LC_Q46R_ | | ATYYADSVKSRFTISRDDSKNTAYLQMNNLKTEDTAVYYCVRHGNFGNSYVSFFAYWG |
| | G141S-VH | | QGTLVTVSS |
| 1003 | F6A_HC_Q46D_ | artificial | QTVVTQEPSLTVSPGGTVTLTCGSSTGAVTSGYYPNWVQRKPGQAPRGLIGGTKFLAP |
| | LC_Q46R_ | | GTPARFSGSLLGGKAALTLSGVQPEDEAEYYCALWYSNRWVFGSGTKLTVL |
| | G141S-VL | | |
| 1004 | F6A_HC_Q46E | artificial | EVQLVESGGGLVQPGGSLKLSCAASGFTFNIYAMNWVREAPGKGLEWVARIRSKYNNY |
| | -VH | | ATYYADSVKSRFTISRDDSKNTAYLQMNNLKTEDTAVYYCVRHGNFGNSYVSFFAYWG |
| | | | QGTLVTVSS |
| 1005 | F6A_HC_Q46E | artificial | QTVVTQEPSLTVSPGGTVTLTCGSSTGAVTSGYYPNWVQQKPGQAPRGLIGGTKFLAP |
| | -VL | | GTPARFSGSLLGGKAALTLSGVQPEDEAEYYCALWYSNRWVFGGGTKLTVL |
| 1006 | F6A_HC_Q46E_ | artificial | EVQLVESGGGLVQPGGSLKLSCAASGFTFNIYAMNWVREAPGKGLEWVARIRSKYNNY |
| | LC_L21I_ | | ATYYADSVKSRFTISRDDSKNTAYLQMNNLKTEDTAVYYCVRHGNFGNSYVSFFAYWG |
| | Q46K_G141S- | | QGTLVTVSS |
| | VH | | |
| 1007 | F6A_HC_Q46E_ | artificial | QTVVTQEPSLTVSPGGTVTITCGSSTGAVTSGYYPNWVQKKPGQAPRGLIGGTKFLAP |
| | LC_L21I_ | | GTPARFSGSLLGGKAALTLSGVQPEDEAEYYCALWYSNRWVFGSGTKLTVL |
| | Q46K_G141S- | | |
| | VL | | |
| 1008 | F6A_HC_Q46E_ | artificial | EVQLVESGGGLVQPGGSLKLSCAASGFTFNIYAMNWVREAPGKGLEWVARIRSKYNNY |
| | LC_L21I_ | | ATYYADSVKSRFTISRDDSKNTAYLQMNNLKTEDTAVYYCVRHGNFGNSYVSFFAYWG |
| | Q46R_G141S- | | QGTLVTVSS |
| | VH | | |
| 1009 | F6A_HC_Q46E_ | artificial | QTVVTQEPSLTVSPGGTVTITCGSSTGAVTSGYYPNWVQRKPGQAPRGLIGGTKFLAP |
| | LC_L21I_ | | GTPARFSGSLLGGKAALTLSGVQPEDEAEYYCALWYSNRWVFGSGTKLTVL |
| | Q46R_G141S- | | |
| | VL | | |
| 1010 | F6A_HC_Q46E_ | artificial | EVQLVESGGGLVQPGGSLKLSCAASGFTFNIYAMNWVREAPGKGLEWVARIRSKYNNY |
| | LC_Q46K- | | ATYYADSVKSRFTISRDDSKNTAYLQMNNLKTEDTAVYYCVRHGNFGNSYVSFFAYWG |
| | VH | | QGTLVTVSS |
| 1011 | F6A_HC_Q46E_ | artificial | QTVVTQEPSLTVSPGGTVTLTCGSSTGAVTSGYYPNWVQKKPGQAPRGLIGGTKFLAP |
| | LC_Q46K- | | GTPARFSGSLLGGKAALTLSGVQPEDEAEYYCALWYSNRWVFGGGTKLTVL |
| | VL | | |
| 1012 | F6A_HC_Q46E_ | artificial | EVQLVESGGGLVQPGGSLKLSCAASGFTFNIYAMNWVREAPGKGLEWVARIRSKYNNY |
| | LC_Q46K_ | | ATYYADSVKSRFTISRDDSKNTAYLQMNNLKTEDTAVYYCVRHGNFGNSYVSFFAYWG |
| | G141S-VH | | QGTLVTVSS |
| 1013 | F6A_HC_Q46E_ | artificial | QTVVTQEPSLTVSPGGTVTLTCGSSTGAVTSGYYPNWVQKKPGQAPRGLIGGTKFLAP |
| | LC_Q46K_ | | GTPARFSGSLLGGKAALTLSGVQPEDEAEYYCALWYSNRWVFGSGTKLTVL |
| | G141S-VL | | |
| 1014 | F6A_HC_Q46E_ | artificial | EVQLVESGGGLVQPGGSLKLSCAASGFTFNIYAMNWVREAPGKGLEWVARIRSKYNNY |
| | LC_Q46R- | | ATYYADSVKSRFTISRDDSKNTAYLQMNNLKTEDTAVYYCVRHGNFGNSYVSFFAYWG |
| | VH | | QGTLVTVSS |
| 1015 | F6A_HC_Q46E_ | artificial | QTVVTQEPSLTVSPGGTVTLTCGSSTGAVTSGYYPNWVQRKPGQAPRGLIGGTKFLAP |
| | LC_Q46R- | | GTPARFSGSLLGGKAALTLSGVQPEDEAEYYCALWYSNRWVFGGGTKLTVL |
| | VL | | |
| 1016 | F6A_HC_Q46E_ | artificial | EVQLVESGGGLVQPGGSLKLSCAASGFTFNIYAMNWVREAPGKGLEWVARIRSKYNNY |
| | LC_Q46R_ | | ATYYADSVKSRFTISRDDSKNTAYLQMNNLKTEDTAVYYCVRHGNFGNSYVSFFAYWG |
| | G141S-VH | | QGTLVTVSS |
| 1017 | F6A_HC_Q46E_ | artificial | QTVVTQEPSLTVSPGGTVTLTCGSSTGAVTSGYYPNWVQRKPGQAPRGLIGGTKFLAP |
| | LC_Q46R_ | | GTPARFSGSLLGGKAALTLSGVQPEDEAEYYCALWYSNRWVFGSGTKLTVL |
| | G141S-VL | | |
| 1018 | F6A_HC_Q46K | artificial | EVQLVESGGGLVQPGGSLKLSCAASGFTFNIYAMNWVRKAPGKGLEWVARIRSKYNNY |
| | -VH | | ATYYADSVKSRFTISRDDSKNTAYLQMNNLKTEDTAVYYCVRHGNFGNSYVSFFAYWG |
| | | | QGTLVTVSS |
| 1019 | F6A_HC_Q46K | artificial | QTVVTQEPSLTVSPGGTVTLTCGSSTGAVTSGYYPNWVQQKPGQAPRGLIGGTKFLAP |
| | -VL | | GTPARFSGSLLGGKAALTLSGVQPEDEAEYYCALWYSNRWVFGGGTKLTVL |
| 1020 | F6A_HC_Q46R | artificial | EVQLVESGGGLVQPGGSLKLSCAASGFTFNIYAMNWVRRAPGKGLEWVARIRSKYNNY |
| | -VH | | ATYYADSVKSRFTISRDDSKNTAYLQMNNLKTEDTAVYYCVRHGNFGNSYVSFFAYWG |
| | | | QGTLVTVSS |
| 1021 | F6A_HC_Q46R | artificial | QTVVTQEPSLTVSPGGTVTLTCGSSTGAVTSGYYPNWVQQKPGQAPRGLIGGTKFLAP |
| | -VL | | GTPARFSGSLLGGKAALTLSGVQPEDEAEYYCALWYSNRWVFGGGTKLTVL |
| 1022 | F6A_HC_V107A- | artificial | EVQLVESGGGLVQPGGSLKLSCAASGFTFNIYAMNWVRQAPGKGLEWVARIRSKYNNY |
| | VH | | ATYYADSVKSRFTISRDDSKNTAYLQMNNLKTEDTAVYYCARHGNFGNSYVSFFAYWG |
| | | | QGTLVTVSS |
| 1023 | F6A_HC_V107A- | artificial | QTVVTQEPSLTVSPGGTVTLTCGSSTGAVTSGYYPNWVQQKPGQAPRGLIGGTKFLAP |
| | VL | | GTPARFSGSLLGGKAALTLSGVQPEDEAEYYCALWYSNRWVFGGGTKLTVL |
| 1024 | F6A_HC_V107L- | artificial | EVQLVESGGGLVQPGGSLKLSCAASGFTFNIYAMNWVRQAPGKGLEWVARIRSKYNNY |
| | VH | | ATYYADSVKSRFTISRDDSKNTAYLQMNNLKTEDTAVYYCLRHGNFGNSYVSFFAYWG |
| | | | QGTLVTVSS |
| 1025 | F6A_HC_V107L- | artificial | QTVVTQEPSLTVSPGGTVTLTCGSSTGAVTSGYYPNWVQQKPGQAPRGLIGGTKFLAP |
| | VL | | GTPARFSGSLLGGKAALTLSGVQPEDEAEYYCALWYSNRWVFGGGTKLTVL |
| 1026 | F6A_I2E- | artificial | IYAIN |
| | HCDR1 | | |
| 1027 | F6A_I2E- | artificial | RIRSKYNNYATYYADAVKS |
| | HCDR2 | | |
| 1028 | F6A_I2E- | artificial | AGNFGSSYVSFFAY |
| | HCDR3 | | |
| 1029 | F6A_I2E- | artificial | GSSTGAVTSGYYPN |
| | LCDR1 | | |
| 1030 | F6A_I2E- | artificial | GTKFLAP |
| | LCDR2 | | |
| 1031 | F6A_I2E- | artificial | ALWYSNRWV |
| | LCDR3 | | |
| 1032 | F6A_I2E- | artificial | EVQLVESGGGLVQPGGSLKLSCAASGFTFNIYAINWVRQAPGKGLEWVARIRSKYNNY |
| | VH | | ATYYADAVKSRFTISRDDSKNTVYLQMNNLKTEDTAVYYCARAGNFGSSYVSFFAYWG |
| | | | QGTLVTVSS |
| 1033 | F6A_I2E- | artificial | QTVVTQEPSLTVSPGGTVTITCGSSTGAVTSGYYPNWVQKKPGQAPRGLIGGTKFLAP |
| | VL | | GTPARFSGSLSGGKAALTLSGVQPEDEAEYYCALWYSNRWVFGSGTKLTVL |
| 1034 | F6A_I2K- | artificial | IYAMN |
| | HCDR1 | | |
| 1035 | F6A_I2K- | artificial | RIRSKYNNYATYYAEAVKG |
| | HCDR2 | | |
| 1036 | F6A_I2K- | artificial | NENIGTSYVSFFAY |
| | HCDR3 | | |
| 1037 | F6A_I2K- | artificial | GSSTGAVTSGYYPN |
| | LCDR1 | | |
| 1038 | F6A_I2K- | artificial | GTKFLAP |
| | LCDR2 | | |
| 1039 | F6A_I2K- | artificial | ALWYSNRWV |
| | LCDR3 | | |
| 1040 | F6A_I2K- | artificial | EVQLVESGGGLVQPGGSLKLSCAASGFTFNIYAMNWVRQAPGKGLEWVARIRSKYNNY |
| | VH | | ATYYAEAVKGRFTISRDDSKNTVYLQMNNLKTEDTAVYYCVRNENIGTSYVSFFAYWG |
| | | | QGTLVTVSS |
| 1041 | F6A_I2K- | artificial | QTVVTQEPSLTVSPGGTVTITCGSSTGAVTSGYYPNWVQQKPGQAPRGLIGGTKFLAP |
| | VL | | GTPARFSGSLSGGKAALTLSGVQPEDEAEYYCALWYSNRWVFGSGTKLTVL |
| 1042 | F6A_I2L- | artificial | IYAMN |
| | HCDR1 | | |
| 1043 | F6A_I2L- | artificial | RIRSKYNNYATYYADAVKS |
| | HCDR2 | | |
| 1044 | F6A_I2L- | artificial | AGNFGSSYVSFFAY |
| | HCDR3 | | |
| 1045 | F6A_I2L- | artificial | GSSTGAVTSGYYPN |
| | LCDR1 | | |
| 1046 | F6A_I2L- | artificial | GTKFLAP |
| | LCDR2 | | |
| 1047 | F6A_I2L- | artificial | ALYYSNRWV |
| | LCDR3 | | |
| 1048 | F6A_I2L- | artificial | EVQLVESGGGLVQPGGSLKLSCAASGFTFNIYAMNWVRQAPGKGMEWVARIRSKYNNY |
| | VH | | ATYYADAVKSRFTISRDDSKNTLYLQMNNLKTEDTAVYYCVRAGNFGSSYVSFFAYWG |
| | | | QGTLVTVSS |
| 1049 | F6A_I2L- | artificial | QTVVTQEPSLTVSPGGTVTITCGSSTGAVTSGYYPNWIQKKPGQAPRGLIGGTKFLAP |
| | VL | | GTPARFSGSLEGGKAALTLSGVQPEDEAEYYCALYYSNRWVFGSGTKLTVL |
| 1050 | F6A_I2M- | artificial | IYAMN |
| | HCDR1 | | |
| 1051 | F6A_I2M- | artificial | RIRSKYNNYATYYADAVKS |
| | HCDR2 | | |
| 1052 | F6A_I2M- | artificial | AGNFGTSYVSFFAY |
| | HCDR3 | | |
| 1053 | F6A_I2M- | artificial | GSSTGAVTSGYYPN |
| | LCDR1 | | |
| 1054 | F6A_I2M- | artificial | GTKFLAP |
| | LCDR2 | | |
| 1055 | F6A_I2M- | artificial | ALWYSNRWV |
| | LCDR3 | | |
| 1056 | F6A_I2M- | artificial | EVQLVESGGGLVQPGGSLKLSCAASGFTFNIYAMNWVRQAPGKGMEWVARIRSKYNNY |
| | VH | | ATYYADAVKSRFTISRDDSKNTLYLQMNNLKTEDTAVYYCVRAGNFGTSYVSFFAYWG |
| | | | QGTLVTVSS |
| 1057 | F6A_I2M- | artificial | QTVVTQEPSLTVSPGGTVTITCGSSTGAVTSGYYPNWVQKKPGQAPRGLIGGTKFLAP |
| | VL | | GTPARFSGSLSGGKAALTLSGVQPEDEAEYYCALWYSNRWVFGSGTKLTVL |
| 1058 | F6A_I2M2- | artificial | IYAIN |
| | HCDR1 | | |
| 1059 | F6A_I2M2- | artificial | RIRSKYNNYATYYADAVKS |
| | HCDR2 | | |
| 1060 | F6A_I2M2- | artificial | NANFGTSYVSFFAY |
| | HCDR3 | | |
| 1061 | F6A_I2M2- | artificial | GSSTGAVTSGYYPN |
| | LCDR1 | | |
| 1062 | F6A_I2M2- | artificial | GTKFLAP |
| | LCDR2 | | |
| 1063 | F6A_I2M2- | artificial | ALWYSNRWV |
| | LCDR3 | | |
| 1064 | F6A_I2M2- | artificial | EVQLVESGGGLVQPGGSLKLSCAASGFTFNIYAINWVREAPGKGLEWVARIRSKYNNY |
| | VH | | ATYYADAVKSRFTISRDDSKNTAYLQMNNLKTEDTAVYYCVRNANFGTSYVSFFAYWG |
| | | | QGTLVTVSS |
| 1065 | F6A_I2M2- | artificial | QTVVTQEPSLTVSPGGTVTLTCGSSTGAVTSGYYPNWVQKKPGQAPRGLIGGTKFLAP |
| | VL | | GTPARFSGSLLGGKAALTLSGVQPEDEAEYYCALWYSNRWVFGSGTKLTVL |
| 1066 | F6A_LC_G141S- | artificial | EVQLVESGGGLVQPGGSLKLSCAASGFTFNIYAMNWVRQAPGKGLEWVARIRSKYNNY |
| | VH | | ATYYADSVKSRFTISRDDSKNTAYLQMNNLKTEDTAVYYCVRHGNFGNSYVSFFAYWG |
| | | | QGTLVTVSS |
| 1067 | F6A_LC_G141S- | artificial | QTVVTQEPSLTVSPGGTVTLTCGSSTGAVTSGYYPNWVQQKPGQAPRGLIGGTKFLAP |
| | VL | | GTPARFSGSLLGGKAALTLSGVQPEDEAEYYCALWYSNRWVFGSGTKLTVL |
| 1068 | F6A_LC_G141S_ | artificial | EVQLVESGGGLVQPGGSLKLSCAASGFTFNIYAMNWVRQAPGKGLEWVARIRSKYNNY |
| | L21I-VH | | ATYYADSVKSRFTISRDDSKNTAYLQMNNLKTEDTAVYYCVRHGNFGNSYVSFFAYWG |
| | | | QGTLVTVSS |
| 1069 | F6A_LC_G141S_ | artificial | QTVVTQEPSLTVSPGGTVTITCGSSTGAVTSGYYPNWVQQKPGQAPRGLIGGTKFLAP |
| | L21I-VL | | GTPARFSGSLLGGKAALTLSGVQPEDEAEYYCALWYSNRWVFGSGTKLTVL |
| 1070 | F6A_LC_L83E | artificial | EVQLVESGGGLVQPGGSLKLSCAASGFTFNIYAMNWVRQAPGKGLEWVARIRSKYNNY |
| | -VH | | ATYYADSVKSRFTISRDDSKNTAYLQMNNLKTEDTAVYYCVRHGNFGNSYVSFFAYWG |
| | | | QGTLVTVSS |
| 1071 | F6A_LC_L83E | artificial | QTVVTQEPSLTVSPGGTVTLTCGSSTGAVTSGYYPNWVQQKPGQAPRGLIGGTKFLAP |
| | -VL | | GTPARFSGSLEGGKAALTLSGVQPEDEAEYYCALWYSNRWVFGGGTKLTVL |
| 1072 | F6A_LC_L83S | artificial | EVQLVESGGGLVQPGGSLKLSCAASGFTFNIYAMNWVRQAPGKGLEWVARIRSKYNNY |
| | -VH | | ATYYADSVKSRFTISRDDSKNTAYLQMNNLKTEDTAVYYCVRHGNFGNSYVSFFAYWG |
| | | | QGTLVTVSS |
| 1073 | F6A_LC_L83S | artificial | QTVVTQEPSLTVSPGGTVTLTCGSSTGAVTSGYYPNWVQQKPGQAPRGLIGGTKFLAP |
| | -VL | | GTPARFSGSLSGGKAALTLSGVQPEDEAEYYCALWYSNRWVFGGGTKLTVL |
| 1074 | F6A_LC_Q46E | artificial | EVQLVESGGGLVQPGGSLKLSCAASGFTFNIYAMNWVRQAPGKGLEWVARIRSKYNNY |
| | -VH | | ATYYADSVKSRFTISRDDSKNTAYLQMNNLKTEDTAVYYCVRHGNFGNSYVSFFAYWG |
| | | | QGTLVTVSS |
| 1075 | F6A_LC_Q46E | artificial | QTVVTQEPSLTVSPGGTVTLTCGSSTGAVTSGYYPNWVQEKPGQAPRGLIGGTKFLAP |
| | -VL | | GTPARFSGSLLGGKAALTLSGVQPEDEAEYYCALWYSNRWVFGGGTKLTVL |
| 1076 | F6A_LC_Q46K | artificial | EVQLVESGGGLVQPGGSLKLSCAASGFTFNIYAMNWVRQAPGKGLEWVARIRSKYNNY |
| | -VH | | ATYYADSVKSRFTISRDDSKNTAYLQMNNLKTEDTAVYYCVRHGNFGNSYVSFFAYWG |
| | | | QGTLVTVSS |
| 1077 | F6A_LC_Q46K | artificial | QTVVTQEPSLTVSPGGTVTLTCGSSTGAVTSGYYPNWVQKKPGQAPRGLIGGTKFLAP |
| | -VL | | GTPARFSGSLLGGKAALTLSGVQPEDEAEYYCALWYSNRWVFGGGTKLTVL |
| 1078 | F6A_LC_A107L- | artificial | IYAMN |
| | HCDR1 | | |
| 1079 | F6A_LC_A107L- | artificial | RIRSKYNNYATYYADSVKS |
| | HCDR2 | | |
| 1080 | F6A_LC_A107L- | artificial | HGNFGNSYVSFFAY |
| | HCDR3 | | |
| 1081 | F6A_LC_A107L- | artificial | GSSTGAVTSGYYPN |
| | LCDR1 | | |
| 1082 | F6A_LC_A107L- | artificial | GTKFLAP |
| | LCDR2 | | |
| 1083 | F6A_LC_A107L- | artificial | LLWYSNRWV |
| | LCDR3 | | |
| 1084 | F6A_LC_A107L- | artificial | EVQLVESGGGLVQPGGSLKLSCAASGFTFNIYAMNWVRQAPGKGLEWVARIRSKYNNY |
| | VH | | ATYYADSVKSRFTISRDDSKNTAYLQMNNLKTEDTAVYYCVRHGNFGNSYVSFFAYWG |
| | | | QGTLVTVSS |
| 1085 | F6A_LC_A107L- | artificial | QTVVTQEPSLTVSPGGTVTLTCGSSTGAVTSGYYPNWVQQKPGQAPRGLIGGTKFLAP |
| | VL | | GTPARFSGSLLGGKAALTLSGVQPEDEAEYYCLLWYSNRWVFGGGTKLTVL |
| 1086 | F6A_LC_V44I | artificial | EVQLVESGGGLVQPGGSLKLSCAASGFTFNIYAMNWVRQAPGKGLEWVARIRSKYNNY |
| | -VH | | ATYYADSVKSRFTISRDDSKNTAYLQMNNLKTEDTAVYYCVRHGNFGNSYVSFFAYWG |
| | | | QGTLVTVSS |
| 1087 | F6A_LC_V44I | artificial | QTVVTQEPSLTVSPGGTVTLTCGSSTGAVTSGYYPNWIQQKPGQAPRGLIGGTKFLAP |
| | -VL | | GTPARFSGSLLGGKAALTLSGVQPEDEAEYYCALWYSNRWVFGGGTKLTVL |
| 1088 | F6A_LC_V44L | artificial | EVQLVESGGGLVQPGGSLKLSCAASGFTFNIYAMNWVRQAPGKGLEWVARIRSKYNNY |
| | -VH | | ATYYADSVKSRFTISRDDSKNTAYLQMNNLKTEDTAVYYCVRHGNFGNSYVSFFAYWG |
| | | | QGTLVTVSS |
| 1089 | F6A_LC_V44L | artificial | QTVVTQEPSLTVSPGGTVTLTCGSSTGAVTSGYYPNWLQQKPGQAPRGLIGGTKFLAP |
| | -VL | | GTPARFSGSLLGGKAALTLSGVQPEDEAEYYCALWYSNRWVFGGGTKLTVL |
| 1090 | F6A_LC_V44M | artificial | EVQLVESGGGLVQPGGSLKLSCAASGFTFNIYAMNWVRQAPGKGLEWVARIRSKYNNY |
| | -VH | | ATYYADSVKSRFTISRDDSKNTAYLQMNNLKTEDTAVYYCVRHGNFGNSYVSFFAYWG |
| | | | QGTLVTVSS |
| 1091 | F6A_LC_V44M | artificial | QTVVTQEPSLTVSPGGTVTLTCGSSTGAVTSGYYPNWMQQKPGQAPRGLIGGTKFLAP |
| | -VL | | GTPARFSGSLLGGKAALTLSGVQPEDEAEYYCALWYSNRWVFGGGTKLTVL |
| 1092 | F6A_LC_W109Y- | artificial | IYAMN |
| | HCDR1 | | |
| 1093 | F6A_LC_W109Y- | artificial | RIRSKYNNYATYYADSVKS |
| | HCDR2 | | |
| 1094 | F6A_LC_W109Y- | artificial | HGNFGNSYVSFFAY |
| | HCDR3 | | |
| 1095 | F6A_LC_W109Y- | artificial | GSSTGAVTSGYYPN |
| | LCDR1 | | |
| 1096 | F6A_LC_W109Y- | artificial | GTKFLAP |
| | LCDR2 | | |
| 1097 | F6A_LC_W109Y- | artificial | ALYYSNRWV |
| | LCDR3 | | |
| 1098 | F6A_LC_W109Y- | artificial | EVQLVESGGGLVQPGGSLKLSCAASGFTFNIYAMNWVRQAPGKGLEWVARIRSKYNNY |
| | VH | | ATYYADSVKSRFTISRDDSKNTAYLQMNNLKTEDTAVYYCVRHGNFGNSYVSFFAYWG |
| | | | QGTLVTVSS |
| 1099 | F6A_LC_W109Y- | artificial | QTVVTQEPSLTVSPGGTVTLTCGSSTGAVTSGYYPNWVQQKPGQAPRGLIGGTKFLAP |
| | VL | | GTPARFSGSLLGGKAALTLSGVQPEDEAEYYCALYYSNRWVFGGGTKLTVL |
| 1100 | F7O-HCDR1 | artificial | VYAMN |
| 1101 | F7O-HCDR2 | artificial | RIRSKYNNYATYYADSVKK |
| 1102 | F7O-HCDR3 | artificial | HGNFGNSYISWWAY |
| 1103 | F7O-LCDR1 | artificial | GSSTGAVTSGYYPN |
| 1104 | F7O-LCDR2 | artificial | GTKFLAP |
| 1105 | F7O-LCDR3 | artificial | ALWYSNRWV |
| 1106 | F7O-VH | artificial | EVQLVESGGGLVQPGGSLKLSCAASGFTFNVYAMNWVRQAPGKGLEWVARIRSKYNNY |
| | | | ATYYADSVKKRFTISRDDSKNTAYLQMNNLKTEDTAVYYCVRHGNFGNSYISWWAYWG |
| | | | QGTLVTVSS |
| 1107 | F7O-VL | artificial | QTVVTQEPSLTVSPGGTVTLTCGSSTGAVTSGYYPNWVQQKPGQAPRGLIGGTKFLAP |
| | | | GTPARFSGSLLGGKAALTLSGVQPEDEAEYYCALWYSNRWVFGGGTKLTVL |
| 1108 | F7O_HC_A89I | artificial | EVQLVESGGGLVQPGGSLKLSCAASGFTFNVYAMNWVRQAPGKGLEWVARIRSKYNNY |
| | -VH | | ATYYADSVKKRFTISRDDSKNTIYLQMNNLKTEDTAVYYCVRHGNFGNSYISWWAYWG |
| | | | QGTLVTVSS |
| 1109 | F7O_HC_A89I | artificial | QTVVTQEPSLTVSPGGTVTLTCGSSTGAVTSGYYPNWVQQKPGQAPRGLIGGTKFLAP |
| | -VL | | GTPARFSGSLLGGKAALTLSGVQPEDEAEYYCALWYSNRWVFGGGTKLTVL |
| 1110 | F7O_HC_A89L | artificial | EVQLVESGGGLVQPGGSLKLSCAASGFTFNVYAMNWVRQAPGKGLEWVARIRSKYNNY |
| | -VH | | ATYYADSVKKRFTISRDDSKNTLYLQMNNLKTEDTAVYYCVRHGNFGNSYISWWAYWG |
| | | | QGTLVTVSS |
| 1111 | F7O_HC_A89L | artificial | QTVVTQEPSLTVSPGGTVTLTCGSSTGAVTSGYYPNWVQQKPGQAPRGLIGGTKFLAP |
| | -VL | | GTPARFSGSLLGGKAALTLSGVQPEDEAEYYCALWYSNRWVFGGGTKLTVL |
| 1112 | F7O_HC_A89T | artificial | EVQLVESGGGLVQPGGSLKLSCAASGFTFNVYAMNWVRQAPGKGLEWVARIRSKYNNY |
| | -VH | | ATYYADSVKKRFTISRDDSKNTTYLQMNNLKTEDTAVYYCVRHGNFGNSYISWWAYWG |
| | | | QGTLVTVSS |
| 1113 | F7O_HC_A89T | artificial | QTVVTQEPSLTVSPGGTVTLTCGSSTGAVTSGYYPNWVQQKPGQAPRGLIGGTKFLAP |
| | -VL | | GTPARFSGSLLGGKAALTLSGVQPEDEAEYYCALWYSNRWVFGGGTKLTVL |
| 1114 | F7O_HC_A89V | artificial | EVQLVESGGGLVQPGGSLKLSCAASGFTFNVYAMNWVRQAPGKGLEWVARIRSKYNNY |
| | -VH | | ATYYADSVKKRFTISRDDSKNTVYLQMNNLKTEDTAVYYCVRHGNFGNSYISWWAYWG |
| | | | QGTLVTVSS |
| 1115 | F7O_HC_A89V | artificial | QTVVTQEPSLTVSPGGTVTLTCGSSTGAVTSGYYPNWVQQKPGQAPRGLIGGTKFLAP |
| | -VL | | GTPARFSGSLLGGKAALTLSGVQPEDEAEYYCALWYSNRWVFGGGTKLTVL |
| 1116 | F7O_HC_L52M | artificial | EVQLVESGGGLVQPGGSLKLSCAASGFTFNVYAMNWVRQAPGKGMEWVARIRSKYNNY |
| | -VH | | ATYYADSVKKRFTISRDDSKNTAYLQMNNLKTEDTAVYYCVRHGNFGNSYISWWAYWG |
| | | | QGTLVTVSS |
| 1117 | F7O_HC_L52M | artificial | QTVVTQEPSLTVSPGGTVTLTCGSSTGAVTSGYYPNWVQQKPGQAPRGLIGGTKFLAP |
| | -VL | | GTPARFSGSLLGGKAALTLSGVQPEDEAEYYCALWYSNRWVFGGGTKLTVL |
| 1118 | F7O_HC_L52M_ | artificial | EVQLVESGGGLVQPGGSLKLSCAASGFTFNVYAMNWVRQAPGKGMEWVARIRSKYNNY |
| | LC_L21I_ | | ATYYADSVKKRFTISRDDSKNTAYLQMNNLKTEDTAVYYCVRHGNFGNSYISWWAYWG |
| | Q46K_G141S- | | QGTLVTVSS |
| | VH | | |
| 1119 | F7O_HC_L52M_ | artificial | QTVVTQEPSLTVSPGGTVTITCGSSTGAVTSGYYPNWVQKKPGQAPRGLIGGTKFLAP |
| | LC_L21I_ | | GTPARFSGSLLGGKAALTLSGVQPEDEAEYYCALWYSNRWVFGSGTKLTVL |
| | Q46K_G141S- | | |
| | VL | | |
| 1120 | F7O_HC_L52M_ | artificial | EVQLVESGGGLVQPGGSLKLSCAASGFTFNVYAMNWVRQAPGKGMEWVARIRSKYNNY |
| | LC_Q46K- | | ATYYADSVKKRFTISRDDSKNTAYLQMNNLKTEDTAVYYCVRHGNFGNSYISWWAYWG |
| | VH | | QGTLVTVSS |
| 1121 | F7O_HC_L52M_ | artificial | QTVVTQEPSLTVSPGGTVTLTCGSSTGAVTSGYYPNWVQKKPGQAPRGLIGGTKFLAP |
| | LC_Q46K- | | GTPARFSGSLLGGKAALTLSGVQPEDEAEYYCALWYSNRWVFGGGTKLTVL |
| | VL | | |
| 1122 | F7O_HC_L52M_ | artificial | EVQLVESGGGLVQPGGSLKLSCAASGFTFNVYAMNWVRQAPGKGMEWVARIRSKYNNY |
| | LC_Q46K_ | | ATYYADSVKKRFTISRDDSKNTAYLQMNNLKTEDTAVYYCVRHGNFGNSYISWWAYWG |
| | G141S-VH | | QGTLVTVSS |
| 1123 | F7O_HC_L52M_ | artificial | QTVVTQEPSLTVSPGGTVTLTCGSSTGAVTSGYYPNWVQKKPGQAPRGLIGGTKFLAP |
| | LC_Q46K_ | | GTPARFSGSLLGGKAALTLSGVQPEDEAEYYCALWYSNRWVFGSGTKLTVL |
| | G141S-VL | | |
| 1124 | F7O_HC_L52V | artificial | EVQLVESGGGLVQPGGSLKLSCAASGFTFNVYAMNWVRQAPGKGVEWVARIRSKYNNY |
| | -VH | | ATYYADSVKKRFTISRDDSKNTAYLQMNNLKTEDTAVYYCVRHGNFGNSYISWWAYWG |
| | | | QGTLVTVSS |
| 1125 | F7O_HC_L52V | artificial | QTVVTQEPSLTVSPGGTVTLTCGSSTGAVTSGYYPNWVQQKPGQAPRGLIGGTKFLAP |
| | -VL | | GTPARFSGSLLGGKAALTLSGVQPEDEAEYYCALWYSNRWVFGGGTKLTVL |
| 1126 | F7O_HC_L52V_ | artificial | EVQLVESGGGLVQPGGSLKLSCAASGFTFNVYAMNWVRQAPGKGVEWVARIRSKYNNY |
| | LC_V44F- | | ATYYADSVKKRFTISRDDSKNTAYLQMNNLKTEDTAVYYCVRHGNFGNSYISWWAYWG |
| | VH | | QGTLVTVSS |
| 1127 | F7O_HC_L52V_ | artificial | QTVVTQEPSLTVSPGGTVTLTCGSSTGAVTSGYYPNWFQQKPGQAPRGLIGGTKFLAP |
| | LC_V44F- | | GTPARFSGSLLGGKAALTLSGVQPEDEAEYYCALWYSNRWVFGGGTKLTVL |
| | VL | | |
| 1128 | F7O_HC_L52V_ | artificial | EVQLVESGGGLVQPGGSLKLSCAASGFTFNVYAMNWVRQAPGKGVEWVARIRSKYNNY |
| | LC_V44Y- | | ATYYADSVKKRFTISRDDSKNTAYLQMNNLKTEDTAVYYCVRHGNFGNSYISWWAYWG |
| | VH | | QGTLVTVSS |
| 1129 | F7O_HC_L52V_ | artificial | QTVVTQEPSLTVSPGGTVTLTCGSSTGAVTSGYYPNWYQQKPGQAPRGLIGGTKFLAP |
| | LC_V44Y | | GTPARFSGSLLGGKAALTLSGVQPEDEAEYYCALWYSNRWVFGGGTKLTVL |
| | VL | | |
| 1130 | F7O_HC_M41F_ | artificial | VYAFN |
| | A89V- | | |
| | HCDR1 | | |
| 1131 | F7O_HC_M41F_ | artificial | RIRSKYNNYATYYADSVKK |
| | A89V- | | |
| | HCDR2 | | |
| 1132 | F7O_HC_M41F_ | artificial | HGNFGNSYISWWAY |
| | A89V-HCDR3 | | |
| 1133 | F7O_HC_M41F_ | artificial | GSSTGAVTSGYYPN |
| | A89V-LCDR1 | | |
| 1134 | F7O_HC_M41F_ | artificial | GTKFLAP |
| | A89V-LCDR2 | | |
| 1135 | F7O_HC_M41F_ | artificial | ALWYSNRWV |
| | A89V-LCDR3 | | |
| 1136 | F7O_HC_M41F_ | artificial | EVQLVESGGGLVQPGGSLKLSCAASGFTFNVYAFNWVRQAPGKGLEWVARIRSKYNNY |
| | A89V-VH | | ATYYADSVKKRFTISRDDSKNTVYLQMNNLKTEDTAVYYCVRHGNFGNSYISWWAYWG |
| | | | QGTLVTVSS |
| 1137 | F7O_HC_M41F_ | artificial | QTVVTQEPSLTVSPGGTVTLTCGSSTGAVTSGYYPNWVQQKPGQAPRGLIGGTKFLAP |
| | A89V-VL | | GTPARFSGSLLGGKAALTLSGVQPEDEAEYYCALWYSNRWVFGGGTKLTVL |
| 1138 | F7O_HC_M41I | artificial | VYAIN |
| | -HCDR1 | | |
| 1139 | F7O_HC_M41I- | artificial | RIRSKYNNYATYYADSVKK |
| | HCDR2 | | |
| 1140 | F7O_HC_M41I | artificial | HGNFGNSYISWWAY |
| | -HCDR3 | | |
| 1141 | F7O_HC_M41I | artificial | GSSTGAVTSGYYPN |
| | -LCDR1 | | |
| 1142 | F7O_HC_M41I | artificial | GTKFLAP |
| | -LCDR2 | | |
| 1143 | F7O_HC_M41I | artificial | ALWYSNRWV |
| | -LCDR3 | | |
| 1144 | F7O_HC_M41I | artificial | EVQLVESGGGLVQPGGSLKLSCAASGFTFNVYAINWVRQAPGKGLEWVARIRSKYNNY |
| | -VH | | ATYYADSVKKRFTISRDDSKNTAYLQMNNLKTEDTAVYYCVRHGNFGNSYISWWAYWG |
| | | | QGTLVTVSS |
| 1145 | F7O_HC_M41I | artificial | QTVVTQEPSLTVSPGGTVTLTCGSSTGAVTSGYYPNWVQQKPGQAPRGLIGGTKFLAP |
| | -VL | | GTPARFSGSLLGGKAALTLSGVQPEDEAEYYCALWYSNRWVFGGGTKLTVL |
| 1146 | F7O_HC_M41I_ | artificial | EVQLVESGGGLVQPGGSLKLSCAASGFTFNVYAINWVRQAPGKGLEWVARIRSKYNNY |
| | A89L-VH | | ATYYADSVKKRFTISRDDSKNTLYLQMNNLKTEDTAVYYCVRHGNFGNSYISWWAYWG |
| | | | QGTLVTVSS |
| 1147 | F7O_HC_M41I_ | artificial | QTVVTQEPSLTVSPGGTVTLTCGSSTGAVTSGYYPNWVQQKPGQAPRGLIGGTKFLAP |
| | A89L-VL | | GTPARFSGSLLGGKAALTLSGVQPEDEAEYYCALWYSNRWVFGGGTKLTVL |
| 1148 | F7O_HC_M41I_ | artificial | EVQLVESGGGLVQPGGSLKLSCAASGFTFNVYAINWVRQAPGKGLEWVARIRSKYNNY |
| | A89V-VH | | ATYYADSVKKRFTISRDDSKNTVYLQMNNLKTEDTAVYYCVRHGNFGNSYISWWAYWG |
| | | | QGTLVTVSS |
| 1149 | F7O_HC_M41I_ | artificial | QTVVTQEPSLTVSPGGTVTLTCGSSTGAVTSGYYPNWVQQKPGQAPRGLIGGTKFLAP |
| | A89V-VL | | GTPARFSGSLLGGKAALTLSGVQPEDEAEYYCALWYSNRWVFGGGTKLTVL |
| 1150 | F7O_HC_M41I_ | artificial | EVQLVESGGGLVQPGGSLKLSCAASGFTFNVYAINWVRQAPGKGLEWVARIRSKYNNY |
| | A89V_LC_ | | ATYYADSVKKRFTISRDDSKNTVYLQMNNLKTEDTAVYYCVRHGNFGNSYISWWAYWG |
| | L21I_Q46K_ | | QGTLVTVSS |
| | G141S-VH | | |
| 1151 | F7O_HC_M41I_ | artificial | QTVVTQEPSLTVSPGGTVTITCGSSTGAVTSGYYPNWVQKKPGQAPRGLIGGTKFLAP |
| | A89V_LC_ | | GTPARFSGSLLGGKAALTLSGVQPEDEAEYYCALWYSNRWVFGSGTKLTVL |
| | L21I_Q46K_ | | |
| | G141S-VL | | |
| 1152 | F7O_HC_M41I_ | artificial | EVQLVESGGGLVQPGGSLKLSCAASGFTFNVYAINWVRQAPGKGLEWVARIRSKYNNY |
| | A89V_LC_ | | ATYYADSVKKRFTISRDDSKNTVYLQMNNLKTEDTAVYYCVRHGNFGNSYISWWAYWG |
| | Q46K-VH | | QGTLVTVSS |
| 1153 | F7O_HC_M41I_ | artificial | QTVVTQEPSLTVSPGGTVTLTCGSSTGAVTSGYYPNWVQKKPGQAPRGLIGGTKFLAP |
| | A89V_LC_ | | GTPARFSGSLLGGKAALTLSGVQPEDEAEYYCALWYSNRWVFGGGTKLTVL |
| | Q46K-VL | | |
| 1154 | F7O_HC_M41I_ | artificial | EVQLVESGGGLVQPGGSLKLSCAASGFTFNVYAINWVRQAPGKGVEWVARIRSKYNNY |
| | L52V_A89V_ | | ATYYADSVKKRFTISRDDSKNTVYLQMNNLKTEDTAVYYCVRHGNFGNSYISWWAYWG |
| | LC_L21I_ | | QGTLVTVSS |
| | Q46K_G141S_ | | |
| | V44F-VH | | |
| 1155 | F7O_HC_M41I_ | artificial | QTVVTQEPSLTVSPGGTVTITCGSSTGAVTSGYYPNWFQKKPGQAPRGLIGGTKFLAP |
| | L52V_A89V_ | | GTPARFSGSLLGGKAALTLSGVQPEDEAEYYCALWYSNRWVFGSGTKLTVL |
| | LC_L21I_ | | |
| | Q46K_G141S_ | | |
| | V44F-VL | | |
| 1156 | F7O_HC_M41I_ | artificial | EVQLVESGGGLVQPGGSLKLSCAASGFTFNVYAINWVRQAPGKGLEWVARIRSKYNNY |
| | LC_L21I_ | | ATYYADSVKKRFTISRDDSKNTAYLQMNNLKTEDTAVYYCVRHGNFGNSYISWWAYWG |
| | Q46K_G141S- | | QGTLVTVSS |
| | VH | | |
| 1157 | F7O_HC_M41I_ | artificial | QTVVTQEPSLTVSPGGTVTITCGSSTGAVTSGYYPNWVQKKPGQAPRGLIGGTKFLAP |
| | LC_L21I_ | | GTPARFSGSLLGGKAALTLSGVQPEDEAEYYCALWYSNRWVFGSGTKLTVL |
| | Q46K_G141S- | | |
| | VL | | |
| 1158 | F7O_HC_M41I_ | artificial | EVQLVESGGGLVQPGGSLKLSCAASGFTFNVYAINWVREAPGKGLEWVARIRSKYNNY |
| | Q46E_A89V_ | | ATYYADSVKKRFTISRDDSKNTVYLQMNNLKTEDTAVYYCVRHGNFGNSYISWWAYWG |
| | LC_L21I_ | | QGTLVTVSS |
| | Q46K_G141S- | | |
| | VH | | |
| 1159 | F7O_HC_M41I_ | artificial | QTVVTQEPSLTVSPGGTVTITCGSSTGAVTSGYYPNWVQKKPGQAPRGLIGGTKFLAP |
| | Q46E_A89V_ | | GTPARFSGSLLGGKAALTLSGVQPEDEAEYYCALWYSNRWVFGSGTKLTVL |
| | LC_L21I_ | | |
| | Q46K_G141S- | | |
| | VL | | |
| 1160 | F7O_HC_M41V | artificial | VYAVN |
| | -HCDR1 | | |
| 1161 | F7O_HC_M41V | artificial | RIRSKYNNYATYYADSVKK |
| | -HCDR2 | | |
| 1162 | F7O_HC_M41V | artificial | HGNFGNSYISWWAY |
| | -HCDR3 | | |
| 1163 | F7O_HC_M41V | artificial | GSSTGAVTSGYYPN |
| | -LCDR1 | | |
| 1164 | F7O_HC_M41V | artificial | GTKFLAP |
| | -LCDR2 | | |
| 1165 | F7O_HC_M41V | artificial | ALWYSNRWV |
| | -LCDR3 | | |
| 1166 | F7O_HC_M41V | artificial | EVQLVESGGGLVQPGGSLKLSCAASGFTFNVYAVNWVRQAPGKGLEWVARIRSKYNNY |
| | -VH | | ATYYADSVKKRFTISRDDSKNTAYLQMNNLKTEDTAVYYCVRHGNFGNSYISWWAYWG |
| | | | QGTLVTVSS |
| 1167 | F7O_HC_M41V | artificial | QTVVTQEPSLTVSPGGTVTLTCGSSTGAVTSGYYPNWVQQKPGQAPRGLIGGTKFLAP |
| | -VL | | GTPARFSGSLLGGKAALTLSGVQPEDEAEYYCALWYSNRWVFGGGTKLTVL |
| 1168 | F7O_HC_Q46D | artificial | EVQLVESGGGLVQPGGSLKLSCAASGFTFNVYAMNWVRDAPGKGLEWVARIRSKYNNY |
| | -VH | | ATYYADSVKKRFTISRDDSKNTAYLQMNNLKTEDTAVYYCVRHGNFGNSYISWWAYWG |
| | | | QGTLVTVSS |
| 1169 | F7O_HC_Q46D | artificial | QTVVTQEPSLTVSPGGTVTLTCGSSTGAVTSGYYPNWVQQKPGQAPRGLIGGTKFLAP |
| | -VL | | GTPARFSGSLLGGKAALTLSGVQPEDEAEYYCALWYSNRWVFGGGTKLTVL |
| 1170 | F7O_HC_Q46D_ | artificial | EVQLVESGGGLVQPGGSLKLSCAASGFTFNVYAMNWVRDAPGKGLEWVARIRSKYNNY |
| | LC_L21I_ | | ATYYADSVKKRFTISRDDSKNTAYLQMNNLKTEDTAVYYCVRHGNFGNSYISWWAYWG |
| | Q46K_G141S- | | QGTLVTVSS |
| | VH | | |
| 1171 | F7O_HC_Q46D_ | artificial | QTVVTQEPSLTVSPGGTVTITCGSSTGAVTSGYYPNWVQKKPGQAPRGLIGGTKFLAP |
| | LC_L21I_ | | GTPARFSGSLLGGKAALTLSGVQPEDEAEYYCALWYSNRWVFGSGTKLTVL |
| | Q46K_G141S- | | |
| | VL | | |
| 1172 | F7O_HC_Q46D_ | artificial | EVQLVESGGGLVQPGGSLKLSCAASGFTFNVYAMNWVRDAPGKGLEWVARIRSKYNNY |
| | LC_L21I_ | | ATYYADSVKKRFTISRDDSKNTAYLQMNNLKTEDTAVYYCVRHGNFGNSYISWWAYWG |
| | Q46R_G141S- | | QGTLVTVSS |
| | VH | | |
| 1173 | F7O_HC_Q46D_ | artificial | QTVVTQEPSLTVSPGGTVTITCGSSTGAVTSGYYPNWVQRKPGQAPRGLIGGTKFLAP |
| | LC_L21I_ | | GTPARFSGSLLGGKAALTLSGVQPEDEAEYYCALWYSNRWVFGSGTKLTVL |
| | Q46R_G141S- | | |
| | VL | | |
| 1174 | F7O_HC_Q46D_ | artificial | EVQLVESGGGLVQPGGSLKLSCAASGFTFNVYAMNWVRDAPGKGLEWVARIRSKYNNY |
| | LC_Q46K- | | ATYYADSVKKRFTISRDDSKNTAYLQMNNLKTEDTAVYYCVRHGNFGNSYISWWAYWG |
| | VH | | QGTLVTVSS |
| 1175 | F7O_HC_Q46D_ | artificial | QTVVTQEPSLTVSPGGTVTLTCGSSTGAVTSGYYPNWVQKKPGQAPRGLIGGTKFLAP |
| | LC_Q46K- | | GTPARFSGSLLGGKAALTLSGVQPEDEAEYYCALWYSNRWVFGGGTKLTVL |
| | VL | | |
| 1176 | F7O_HC_Q46D_ | artificial | EVQLVESGGGLVQPGGSLKLSCAASGFTFNVYAMNWVRDAPGKGLEWVARIRSKYNNY |
| | LC_Q46K_G1 | | ATYYADSVKKRFTISRDDSKNTAYLQMNNLKTEDTAVYYCVRHGNFGNSYISWWAYWG |
| | 41S-VH | | QGTLVTVSS |
| 1177 | F7O_HC_Q46D_ | artificial | QTVVTQEPSLTVSPGGTVTLTCGSSTGAVTSGYYPNWVQKKPGQAPRGLIGGTKFLAP |
| | LC_Q46K_ | | GTPARFSGSLLGGKAALTLSGVQPEDEAEYYCALWYSNRWVFGSGTKLTVL |
| | G141S-VL | | |
| 1178 | F7O_HC_Q46D_ | artificial | EVQLVESGGGLVQPGGSLKLSCAASGFTFNVYAMNWVRDAPGKGLEWVARIRSKYNNY |
| | LC_Q46R- | | ATYYADSVKKRFTISRDDSKNTAYLQMNNLKTEDTAVYYCVRHGNFGNSYISWWAYWG |
| | VH | | QGTLVTVSS |
| 1179 | F7O_HC_Q46D_ | artificial | QTVVTQEPSLTVSPGGTVTLTCGSSTGAVTSGYYPNWVQRKPGQAPRGLIGGTKFLAP |
| | LC_Q46R- | | GTPARFSGSLLGGKAALTLSGVQPEDEAEYYCALWYSNRWVFGGGTKLTVL |
| | VL | | |
| 1180 | F7O_HC_Q46D_ | artificial | EVQLVESGGGLVQPGGSLKLSCAASGFTFNVYAMNWVRDAPGKGLEWVARIRSKYNNY |
| | LC_Q46R_ | | ATYYADSVKKRFTISRDDSKNTAYLQMNNLKTEDTAVYYCVRHGNFGNSYISWWAYWG |
| | G141S-VH | | QGTLVTVSS |
| 1181 | F7O_HC_Q46D_ | artificial | QTVVTQEPSLTVSPGGTVTLTCGSSTGAVTSGYYPNWVQRKPGQAPRGLIGGTKFLAP |
| | LC_Q46R_ | | GTPARFSGSLLGGKAALTLSGVQPEDEAEYYCALWYSNRWVFGSGTKLTVL |
| | G141S-VL | | |
| 1182 | F7O_HC_Q46E | artificial | EVQLVESGGGLVQPGGSLKLSCAASGFTFNVYAMNWVREAPGKGLEWVARIRSKYNNY |
| | -VH | | ATYYADSVKKRFTISRDDSKNTAYLQMNNLKTEDTAVYYCVRHGNFGNSYISWWAYWG |
| | | | QGTLVTVSS |
| 1183 | F7O_HC_Q46E | artificial | QTVVTQEPSLTVSPGGTVTLTCGSSTGAVTSGYYPNWVQQKPGQAPRGLIGGTKFLAP |
| | -VL | | GTPARFSGSLLGGKAALTLSGVQPEDEAEYYCALWYSNRWVFGGGTKLTVL |
| 1184 | F7O_HC_Q46E_ | artificial | EVQLVESGGGLVQPGGSLKLSCAASGFTFNVYAMNWVREAPGKGLEWVARIRSKYNNY |
| | LC_L21I_ | | ATYYADSVKKRFTISRDDSKNTAYLQMNNLKTEDTAVYYCVRHGNFGNSYISWWAYWG |
| | Q46K_G141S- | | QGTLVTVSS |
| | VH | | |
| 1185 | F7O_HC_Q46E_ | artificial | QTVVTQEPSLTVSPGGTVTITCGSSTGAVTSGYYPNWVQKKPGQAPRGLIGGTKFLAP |
| | LC_L21I_ | | GTPARFSGSLLGGKAALTLSGVQPEDEAEYYCALWYSNRWVFGSGTKLTVL |
| | Q46K_G141S- | | |
| | VL | | |
| 1186 | F7O_HC_Q46E_ | artificial | EVQLVESGGGLVQPGGSLKLSCAASGFTFNVYAMNWVREAPGKGLEWVARIRSKYNNY |
| | LC_L21I_ | | ATYYADSVKKRFTISRDDSKNTAYLQMNNLKTEDTAVYYCVRHGNFGNSYISWWAYWG |
| | Q46R_G141S- | | QGTLVTVSS |
| | VH | | |
| 1187 | F7O_HC_Q46E_ | artificial | QTVVTQEPSLTVSPGGTVTITCGSSTGAVTSGYYPNWVQRKPGQAPRGLIGGTKFLAP |
| | LC_L21I_ | | GTPARFSGSLLGGKAALTLSGVQPEDEAEYYCALWYSNRWVFGSGTKLTVL |
| | Q46R_G141S- | | |
| | VL | | |
| 1188 | F7O_HC_Q46E_ | artificial | EVQLVESGGGLVQPGGSLKLSCAASGFTFNVYAMNWVREAPGKGLEWVARIRSKYNNY |
| | LC_Q46K- | | ATYYADSVKKRFTISRDDSKNTAYLQMNNLKTEDTAVYYCVRHGNFGNSYISWWAYWG |
| | VH | | QGTLVTVSS |
| 1189 | F7O_HC_Q46E_ | artificial | QTVVTQEPSLTVSPGGTVTLTCGSSTGAVTSGYYPNWVQKKPGQAPRGLIGGTKFLAP |
| | LC_Q46K- | | GTPARFSGSLLGGKAALTLSGVQPEDEAEYYCALWYSNRWVFGGGTKLTVL |
| | VL | | |
| 1190 | F7O_HC_Q46E_ | artificial | EVQLVESGGGLVQPGGSLKLSCAASGFTFNVYAMNWVREAPGKGLEWVARIRSKYNNY |
| | LC_Q46K_ | | ATYYADSVKKRFTISRDDSKNTAYLQMNNLKTEDTAVYYCVRHGNFGNSYISWWAYWG |
| | G141S-VH | | QGTLVTVSS |
| 1191 | F7O_HC_Q46E_ | artificial | QTVVTQEPSLTVSPGGTVTLTCGSSTGAVTSGYYPNWVQKKPGQAPRGLIGGTKFLAP |
| | LC_Q46K_ | | GTPARFSGSLLGGKAALTLSGVQPEDEAEYYCALWYSNRWVFGSGTKLTVL |
| | G141S-VL | | |
| 1192 | F7O_HC_Q46E_ | artificial | EVQLVESGGGLVQPGGSLKLSCAASGFTFNVYAMNWVREAPGKGLEWVARIRSKYNNY |
| | LC_Q46R- | | ATYYADSVKKRFTISRDDSKNTAYLQMNNLKTEDTAVYYCVRHGNFGNSYISWWAYWG |
| | VH | | QGTLVTVSS |
| 1193 | F7O_HC_Q46E_ | artificial | QTVVTQEPSLTVSPGGTVTLTCGSSTGAVTSGYYPNWVQRKPGQAPRGLIGGTKFLAP |
| | LC_Q46R- | | GTPARFSGSLLGGKAALTLSGVQPEDEAEYYCALWYSNRWVFGGGTKLTVL |
| | VL | | |
| 1194 | F7O_HC_Q46E_ | artificial | EVQLVESGGGLVQPGGSLKLSCAASGFTFNVYAMNWVREAPGKGLEWVARIRSKYNNY |
| | LC_Q46R_ | | ATYYADSVKKRFTISRDDSKNTAYLQMNNLKTEDTAVYYCVRHGNFGNSYISWWAYWG |
| | G141S-VH | | QGTLVTVSS |
| 1195 | F7O_HC_Q46E_ | artificial | QTVVTQEPSLTVSPGGTVTLTCGSSTGAVTSGYYPNWVQRKPGQAPRGLIGGTKFLAP |
| | LC_Q46R_ | | GTPARFSGSLLGGKAALTLSGVQPEDEAEYYCALWYSNRWVFGSGTKLTVL |
| | G141S-VL | | |
| 1196 | F7O_HC_Q46K | artificial | EVQLVESGGGLVQPGGSLKLSCAASGFTFNVYAMNWVRKAPGKGLEWVARIRSKYNNY |
| | -VH | | ATYYADSVKKRFTISRDDSKNTAYLQMNNLKTEDTAVYYCVRHGNFGNSYISWWAYWG |
| | | | QGTLVTVSS |
| 1197 | F7O_HC_Q46K | artificial | QTVVTQEPSLTVSPGGTVTLTCGSSTGAVTSGYYPNWVQQKPGQAPRGLIGGTKFLAP |
| | -VL | | GTPARFSGSLLGGKAALTLSGVQPEDEAEYYCALWYSNRWVFGGGTKLTVL |
| 1198 | F7O_HC_Q46R | artificial | EVQLVESGGGLVQPGGSLKLSCAASGFTFNVYAMNWVRRAPGKGLEWVARIRSKYNNY |
| | -VH | | ATYYADSVKKRFTISRDDSKNTAYLQMNNLKTEDTAVYYCVRHGNFGNSYISWWAYWG |
| | | | QGTLVTVSS |
| 1199 | F7O_HC_Q46R | artificial | QTVVTQEPSLTVSPGGTVTLTCGSSTGAVTSGYYPNWVQQKPGQAPRGLIGGTKFLAP |
| | -VL | | GTPARFSGSLLGGKAALTLSGVQPEDEAEYYCALWYSNRWVFGGGTKLTVL |
| 1200 | F7O_HC_V107A- | artificial | EVQLVESGGGLVQPGGSLKLSCAASGFTFNVYAMNWVRQAPGKGLEWVARIRSKYNNY |
| | VH | | ATYYADSVKKRFTISRDDSKNTAYLQMNNLKTEDTAVYYCARHGNFGNSYISWWAYWG |
| | | | QGTLVTVSS |
| 1201 | F7O_HC_V107A- | artificial | QTVVTQEPSLTVSPGGTVTLTCGSSTGAVTSGYYPNWVQQKPGQAPRGLIGGTKFLAP |
| | VL | | GTPARFSGSLLGGKAALTLSGVQPEDEAEYYCALWYSNRWVFGGGTKLTVL |
| 1202 | F7O_HC_V107L- | artificial | EVQLVESGGGLVQPGGSLKLSCAASGFTFNVYAMNWVRQAPGKGLEWVARIRSKYNNY |
| | VH | | ATYYADSVKKRFTISRDDSKNTAYLQMNNLKTEDTAVYYCLRHGNFGNSYISWWAYWG |
| | | | QGTLVTVSS |
| 1203 | F7O_HC_V107L- | artificial | QTVVTQEPSLTVSPGGTVTLTCGSSTGAVTSGYYPNWVQQKPGQAPRGLIGGTKFLAP |
| | VL | | GTPARFSGSLLGGKAALTLSGVQPEDEAEYYCALWYSNRWVFGGGTKLTVL |
| 1204 | F7O_HC_W136F- | artificial | VYAMN |
| | HCDR1 | | |
| 1205 | F7O_HC_W136F- | artificial | RIRSKYNNYATYYADSVKK |
| | HCDR2 | | |
| 1206 | F7O_HC_W136F- | artificial | HGNFGNSYISWFAY |
| | HCDR3 | | |
| 1207 | F7O_HC_W136F- | artificial | GSSTGAVTSGYYPN |
| | LCDR1 | | |
| 1208 | F7O_HC_W136F- | artificial | GTKFLAP |
| | LCDR2 | | |
| 1209 | F7O_HC_W136F- | artificial | ALWYSNRWV |
| | LCDR3 | | |
| 1210 | F7O_HC_W136F- | artificial | EVQLVESGGGLVQPGGSLKLSCAASGFTFNVYAMNWVRQAPGKGLEWVARIRSKYNNY |
| | VH | | ATYYADSVKKRFTISRDDSKNTAYLQMNNLKTEDTAVYYCVRHGNFGNSYISWFAYWG |
| | | | QGTLVTVSS |
| 1211 | F7O_HC_W136F- | artificial | QTVVTQEPSLTVSPGGTVTLTCGSSTGAVTSGYYPNWVQQKPGQAPRGLIGGTKFLAP |
| | VL | | GTPARFSGSLLGGKAALTLSGVQPEDEAEYYCALWYSNRWVFGGGTKLTVL |
| 1212 | F7O_HC_W136F_ | artificial | EVQLVESGGGLVQPGGSLKLSCAASGFTFNVYAMNWVRQAPGKGLEWVARIRSKYNNY |
| | LC_V44I- | | ATYYADSVKKRFTISRDDSKNTAYLQMNNLKTEDTAVYYCVRHGNFGNSYISWFAYWG |
| | VH | | QGTLVTVSS |
| 1213 | F7O_HC_W136F_ | artificial | QTVVTQEPSLTVSPGGTVTLTCGSSTGAVTSGYYPNWIQQKPGQAPRGLIGGTKFLAP |
| | LC_V44I- | | GTPARFSGSLLGGKAALTLSGVQPEDEAEYYCALWYSNRWVFGGGTKLTVL |
| | VL | | |
| 1214 | F7O_HC_W136F_ | artificial | EVQLVESGGGLVQPGGSLKLSCAASGFTFNVYAMNWVRQAPGKGLEWVARIRSKYNNY |
| | LC_V44L- | | ATYYADSVKKRFTISRDDSKNTAYLQMNNLKTEDTAVYYCVRHGNFGNSYISWFAYWG |
| | VH | | QGTLVTVSS |
| 1215 | F7O_HC_W136F_ | artificial | QTVVTQEPSLTVSPGGTVTLTCGSSTGAVTSGYYPNWLQQKPGQAPRGLIGGTKFLAP |
| | LC_V44L- | | GTPARFSGSLLGGKAALTLSGVQPEDEAEYYCALWYSNRWVFGGGTKLTVL |
| | VL | | |
| 1216 | F7O_I2E- | artificial | VYAIN |
| | HCDR1 | | |
| 1217 | F7O_I2E- | artificial | RIRSKYNNYATYYADAVKK |
| | HCDR2 | | |
| 1218 | F7O_I2E- | artificial | AGNFGSSYISWWAY |
| | HCDR3 | | |
| 1219 | F7O_I2E- | artificial | GSSTGAVTSGYYPN |
| | LCDR1 | | |
| 1220 | F7O_I2E- | artificial | GTKFLAP |
| | LCDR2 | | |
| 1221 | F7O_I2E- | artificial | ALWYSNRWV |
| | LCDR3 | | |
| 1222 | F7O_I2E- | artificial | EVQLVESGGGLVQPGGSLKLSCAASGFTFNVYAINWVRQAPGKGLEWVARIRSKYNNY |
| | VH | | ATYYADAVKKRFTISRDDSKNTVYLQMNNLKTEDTAVYYCARAGNFGSSYISWWAYWG |
| | | | QGTLVTVSS |
| 1223 | F7O_I2E- | artificial | QTVVTQEPSLTVSPGGTVTITCGSSTGAVTSGYYPNWVQKKPGQAPRGLIGGTKFLAP |
| | VL | | GTPARFSGSLSGGKAALTLSGVQPEDEAEYYCALWYSNRWVFGSGTKLTVL |
| 1224 | F7O_I2K- | artificial | VYAMN |
| | HCDR1 | | |
| 1225 | F7O_I2K- | artificial | RIRSKYNNYATYYAEAVKG |
| | HCDR2 | | |
| 1226 | F7O_I2K- | artificial | NENIGTSYISWWAY |
| | HCDR3 | | |
| 1227 | F7O_I2K- | artificial | GSSTGAVTSGYYPN |
| | LCDR1 | | |
| 1228 | F7O_I2K- | artificial | GTKFLAP |
| | LCDR2 | | |
| 1229 | F7O_I2K- | artificial | ALWYSNRWV |
| | LCDR3 | | |
| 1230 | F7O_I2K- | artificial | EVQLVESGGGLVQPGGSLKLSCAASGFTFNVYAMNWVRQAPGKGLEWVARIRSKYNNY |
| | VH | | ATYYAEAVKGRFTISRDDSKNTVYLQMNNLKTEDTAVYYCVRNENIGTSYISWWAYWG |
| | | | QGTLVTVSS |
| 1231 | F7O_I2K- | artificial | QTVVTQEPSLTVSPGGTVTITCGSSTGAVTSGYYPNWVQQKPGQAPRGLIGGTKFLAP |
| | VL | | GTPARFSGSLSGGKAALTLSGVQPEDEAEYYCALWYSNRWVFGSGTKLTVL |
| 1232 | F7O_I2L- | artificial | VYAMN |
| | HCDR1 | | |
| 1233 | F7O_I2L- | artificial | RIRSKYNNYATYYADAVKK |
| | HCDR2 | | |
| 1234 | F7O_I2L- | artificial | AGNFGSSYISWFAY |
| | HCDR3 | | |
| 1235 | F7O_I2L- | artificial | GSSTGAVTSGYYPN |
| | LCDR1 | | |
| 1236 | F7O_I2L- | artificial | GTKFLAP |
| | LCDR2 | | |
| 1237 | F7O_I2L- | artificial | ALYYSNRWV |
| | LCDR3 | | |
| 1238 | F7O_I2L- | artificial | EVQLVESGGGLVQPGGSLKLSCAASGFTFNVYAMNWVRQAPGKGMEWVARIRSKYNNY |
| | VH | | ATYYADAVKKRFTISRDDSKNTLYLQMNNLKTEDTAVYYCVRAGNFGSSYISWFAYWG |
| | | | QGTLVTVSS |
| 1239 | F7O_I2L- | artificial | QTVVTQEPSLTVSPGGTVTITCGSSTGAVTSGYYPNWIQKKPGQAPRGLIGGTKFLAP |
| | VL | | GTPARFSGSLEGGKAALTLSGVQPEDEAEYYCALYYSNRWVFGSGTKLTVL |
| 1240 | F7O_I2M- | artificial | VYAMN |
| | HCDR1 | | |
| 1241 | F7O_I2M- | artificial | RIRSKYNNYATYYADAVKK |
| | HCDR2 | | |
| 1242 | F7O_I2M- | artificial | AGNFGTSYISWWAY |
| | HCDR3 | | |
| 1243 | F7O_I2M- | artificial | GSSTGAVTSGYYPN |
| | LCDR1 | | |
| 1244 | F7O_I2M- | artificial | GTKFLAP |
| | LCDR2 | | |
| 1245 | F7O_I2M- | artificial | ALWYSNRWV |
| | LCDR3 | | |
| 1246 | F7O_I2M- | artificial | EVQLVESGGGLVQPGGSLKLSCAASGFTFNVYAMNWVRQAPGKGMEWVARIRSKYNNY |
| | VH | | ATYYADAVKKRFTISRDDSKNTLYLQMNNLKTEDTAVYYCVRAGNFGTSYISWWAYWG |
| | | | QGTLVTVSS |
| 1247 | F7O_I2M- | artificial | QTVVTQEPSLTVSPGGTVTITCGSSTGAVTSGYYPNWVQKKPGQAPRGLIGGTKFLAP |
| | VL | | GTPARFSGSLSGGKAALTLSGVQPEDEAEYYCALWYSNRWVFGSGTKLTVL |
| 1248 | F7O_I2M2- | artificial | VYAIN |
| | HCDR1 | | |
| 1249 | F7O_I2M2- | artificial | RIRSKYNNYATYYADAVKK |
| | HCDR2 | | |
| 1250 | F7O_I2M2- | artificial | NANFGTSYISWFAY |
| | HCDR3 | | |
| 1251 | F7O_I2M2- | artificial | GSSTGAVTSGYYPN |
| | LCDR1 | | |
| 1252 | F7O_I2M2- | artificial | GTKFLAP |
| | LCDR2 | | |
| 1253 | F7O_I2M2- | artificial | ALWYSNRWV |
| | LCDR3 | | |
| 1254 | F7O_I2M2_ | artificial | EVQLVESGGGLVQPGGSLKLSCAASGFTFNVYAINWVREAPGKGLEWVARIRSKYNNY |
| | VH | | ATYYADAVKKRFTISRDDSKNTAYLQMNNLKTEDTAVYYCVRNANFGTSYISWFAYWG |
| | | | QGTLVTVSS |
| 1255 | F7O_I2M2- | artificial | QTVVTQEPSLTVSPGGTVTLTCGSSTGAVTSGYYPNWVQKKPGQAPRGLIGGTKFLAP |
| | VL | | GTPARFSGSLLGGKAALTLSGVQPEDEAEYYCALWYSNRWVFGSGTKLTVL |
| 1256 | F7O_LC_G141S- | artificial | EVQLVESGGGLVQPGGSLKLSCAASGFTFNVYAMNWVRQAPGKGLEWVARIRSKYNNY |
| | VH | | ATYYADSVKKRFTISRDDSKNTAYLQMNNLKTEDTAVYYCVRHGNFGNSYISWWAYWG |
| | | | QGTLVTVSS |
| 1257 | F7O_LC_G141S- | artificial | QTVVTQEPSLTVSPGGTVTLTCGSSTGAVTSGYYPNWVQQKPGQAPRGLIGGTKFLAP |
| | VL | | GTPARFSGSLLGGKAALTLSGVQPEDEAEYYCALWYSNRWVFGSGTKLTVL |
| 1258 | F7O_LC_G141S_ | artificial | EVQLVESGGGLVQPGGSLKLSCAASGFTFNVYAMNWVRQAPGKGLEWVARIRSKYNNY |
| | L21I-VH | | ATYYADSVKKRFTISRDDSKNTAYLQMNNLKTEDTAVYYCVRHGNFGNSYISWWAYWG |
| | | | QGTLVTVSS |
| 1259 | F7O_LC_G141S_ | artificial | QTVVTQEPSLTVSPGGTVTITCGSSTGAVTSGYYPNWVQQKPGQAPRGLIGGTKFLAP |
| | L21I-VL | | GTPARFSGSLLGGKAALTLSGVQPEDEAEYYCALWYSNRWVFGSGTKLTVL |
| 1260 | F7O_LC_L83E | artificial | EVQLVESGGGLVQPGGSLKLSCAASGFTFNVYAMNWVRQAPGKGLEWVARIRSKYNNY |
| | -VH | | ATYYADSVKKRFTISRDDSKNTAYLQMNNLKTEDTAVYYCVRHGNFGNSYISWWAYWG |
| | | | QGTLVTVSS |
| 1261 | F7O_LC_L83E | artificial | QTVVTQEPSLTVSPGGTVTLTCGSSTGAVTSGYYPNWVQQKPGQAPRGLIGGTKFLAP |
| | -VL | | GTPARFSGSLEGGKAALTLSGVQPEDEAEYYCALWYSNRWVFGGGTKLTVL |
| 1262 | F7O_LC_L83S | artificial | EVQLVESGGGLVQPGGSLKLSCAASGFTFNVYAMNWVRQAPGKGLEWVARIRSKYNNY |
| | -VH | | ATYYADSVKKRFTISRDDSKNTAYLQMNNLKTEDTAVYYCVRHGNFGNSYISWWAYWG |
| | | | QGTLVTVSS |
| 1263 | F7O_LC_L83S | artificial | QTVVTQEPSLTVSPGGTVTLTCGSSTGAVTSGYYPNWVQQKPGQAPRGLIGGTKFLAP |
| | -VL | | GTPARFSGSLSGGKAALTLSGVQPEDEAEYYCALWYSNRWVFGGGTKLTVL |
| 1264 | F7O_LC_Q46E | artificial | EVQLVESGGGLVQPGGSLKLSCAASGFTFNVYAMNWVRQAPGKGLEWVARIRSKYNNY |
| | -VH | | ATYYADSVKKRFTISRDDSKNTAYLQMNNLKTEDTAVYYCVRHGNFGNSYISWWAYWG |
| | | | QGTLVTVSS |
| 1265 | F7O_LC_Q46E | artificial | QTVVTQEPSLTVSPGGTVTLTCGSSTGAVTSGYYPNWVQEKPGQAPRGLIGGTKFLAP |
| | -VL | | GTPARFSGSLLGGKAALTLSGVQPEDEAEYYCALWYSNRWVFGGGTKLTVL |
| 1266 | F7O_LC_Q46K | artificial | EVQLVESGGGLVQPGGSLKLSCAASGFTFNVYAMNWVRQAPGKGLEWVARIRSKYNNY |
| | -VH | | ATYYADSVKKRFTISRDDSKNTAYLQMNNLKTEDTAVYYCVRHGNFGNSYISWWAYWG |
| | | | QGTLVTVSS |
| 1267 | F7O_LC_Q46K | artificial | QTVVTQEPSLTVSPGGTVTLTCGSSTGAVTSGYYPNWVQKKPGQAPRGLIGGTKFLAP |
| | -VL | | GTPARFSGSLLGGKAALTLSGVQPEDEAEYYCALWYSNRWVFGGGTKLTVL |
| 1268 | F7O_LC_A107L- | artificial | VYAMN |
| | HCDR1 | | |
| 1269 | F7O_LC_A107L- | artificial | RIRSKYNNYATYYADSVKK |
| | HCDR2 | | |
| 1270 | F7O_LC_A107L- | artificial | HGNFGNSYISWWAY |
| | HCDR3 | | |
| 1271 | F7O_LC_A107L- | artificial | GSSTGAVTSGYYPN |
| | LCDR1 | | |
| 1272 | F7O_LC_A107L- | artificial | GTKFLAP |
| | LCDR2 | | |
| 1273 | F7O_LC_A107L- | artificial | LLWYSNRWV |
| | LCDR3 | | |
| 1274 | F7O_LC_A107L- | artificial | EVQLVESGGGLVQPGGSLKLSCAASGFTFNVYAMNWVRQAPGKGLEWVARIRSKYNNY |
| | VH | | ATYYADSVKKRFTISRDDSKNTAYLQMNNLKTEDTAVYYCVRHGNFGNSYISWWAYWG |
| | | | QGTLVTVSS |
| 1275 | F7O_LC_A107L- | artificial | QTVVTQEPSLTVSPGGTVTLTCGSSTGAVTSGYYPNWVQQKPGQAPRGLIGGTKFLAP |
| | VL | | GTPARFSGSLLGGKAALTLSGVQPEDEAEYYCLLWYSNRWVFGGGTKLTVL |
| 1276 | F7O_LC_V44I | artificial | EVQLVESGGGLVQPGGSLKLSCAASGFTFNVYAMNWVRQAPGKGLEWVARIRSKYNNY |
| | -VH | | ATYYADSVKKRFTISRDDSKNTAYLQMNNLKTEDTAVYYCVRHGNFGNSYISWWAYWG |
| | | | QGTLVTVSS |
| 1277 | F7O_LC_V44I | artificial | QTVVTQEPSLTVSPGGTVTLTCGSSTGAVTSGYYPNWIQQKPGQAPRGLIGGTKFLAP |
| | -VL | | GTPARFSGSLLGGKAALTLSGVQPEDEAEYYCALWYSNRWVFGGGTKLTVL |
| 1278 | F7O_LC_V44L | artificial | EVQLVESGGGLVQPGGSLKLSCAASGFTFNVYAMNWVRQAPGKGLEWVARIRSKYNNY |
| | -VH | | ATYYADSVKKRFTISRDDSKNTAYLQMNNLKTEDTAVYYCVRHGNFGNSYISWWAYWG |
| | | | QGTLVTVSS |
| 1279 | F7O_LC_V44L | artificial | QTVVTQEPSLTVSPGGTVTLTCGSSTGAVTSGYYPNWLQQKPGQAPRGLIGGTKFLAP |
| | -VL | | GTPARFSGSLLGGKAALTLSGVQPEDEAEYYCALWYSNRWVFGGGTKLTVL |
| 1280 | F7O_LC_V44M | artificial | EVQLVESGGGLVQPGGSLKLSCAASGFTFNVYAMNWVRQAPGKGLEWVARIRSKYNNY |
| | -VH | | ATYYADSVKKRFTISRDDSKNTAYLQMNNLKTEDTAVYYCVRHGNFGNSYISWWAYWG |
| | | | QGTLVTVSS |
| 1281 | F7O_LC_V44M | artificial | QTVVTQEPSLTVSPGGTVTLTCGSSTGAVTSGYYPNWMQQKPGQAPRGLIGGTKFLAP |
| | -VL | | GTPARFSGSLLGGKAALTLSGVQPEDEAEYYCALWYSNRWVFGGGTKLTVL |
| 1282 | F7O_LC_W109Y- | artificial | VYAMN |
| | HCDR1 | | |
| 1283 | F7O_LC_W109Y- | artificial | RIRSKYNNYATYYADSVKK |
| | HCDR2 | | |
| 1284 | F7O_LC_W109Y- | artificial | HGNFGNSYISWWAY |
| | HCDR3 | | |
| 1285 | F7O_LC_W109Y- | artificial | GSSTGAVTSGYYPN |
| | LCDR1 | | |
| 1286 | F7O_LC_W109Y- | artificial | GTKFLAP |
| | LCDR2 | | |
| 1287 | F7O_LC_W109Y- | artificial | ALYYSNRWV |
| | LCDR3 | | |
| 1288 | F7O_LC_W109Y- | artificial | EVQLVESGGGLVQPGGSLKLSCAASGFTFNVYAMNWVRQAPGKGLEWVARIRSKYNNY |
| | VH | | ATYYADSVKKRFTISRDDSKNTAYLQMNNLKTEDTAVYYCVRHGNFGNSYISWWAYWG |
| | | | QGTLVTVSS |
| 1289 | F7O_LC_W109Y- | artificial | QTVVTQEPSLTVSPGGTVTLTCGSSTGAVTSGYYPNWVQQKPGQAPRGLIGGTKFLAP |
| | VL | | GTPARFSGSLLGGKAALTLSGVQPEDEAEYYCALYYSNRWVFGGGTKLTVL |
| 1290 | G4H-HCDR1 | artificial | RYAMN |
| 1291 | G4H-HCDR2 | artificial | RIRSKYNNYATYYADSVKG |
| 1292 | G4H-HCDR3 | artificial | HGNFGNSYLSYFAY |
| 1293 | G4H-LCDR1 | artificial | GSSTGAVTSGYYPN |
| 1294 | G4H-LCDR2 | artificial | GTKFLAP |
| 1295 | G4H-LCDR3 | artificial | ALWYSNRWV |
| 1296 | G4H-VH | artificial | EVQLVESGGGLVQPGGSLKLSCAASGFTFNRYAMNWVRQAPGKGLEWVARIRSKYNNY |
| | | | ATYYADSVKGRFTISRDDSKNTAYLQMNNLKTEDTAVYYCVRHGNFGNSYLSYFAYWG |
| | | | QGTLVTVSS |
| 1297 | G4H-VL | artificial | QTVVTQEPSLTVSPGGTVTLTCGSSTGAVTSGYYPNWVQQKPGQAPRGLIGGTKFLAP |
| | | | GTPARFSGSLLGGKAALTLSGVQPEDEAEYYCALWYSNRWVFGGGTKLTVL |
| 1298 | G4H_HC_A89I | artificial | EVQLVESGGGLVQPGGSLKLSCAASGFTFNRYAMNWVRQAPGKGLEWVARIRSKYNNY |
| | -VH | | ATYYADSVKGRFTISRDDSKNTIYLQMNNLKTEDTAVYYCVRHGNFGNSYLSYFAYWG |
| | | | QGTLVTVSS |
| 1299 | G4H_HC_A89I | artificial | QTVVTQEPSLTVSPGGTVTLTCGSSTGAVTSGYYPNWVQQKPGQAPRGLIGGTKFLAP |
| | -VL | | GTPARFSGSLLGGKAALTLSGVQPEDEAEYYCALWYSNRWVFGGGTKLTVL |
| 1300 | G4H_HC_A89L | artificial | EVQLVESGGGLVQPGGSLKLSCAASGFTFNRYAMNWVRQAPGKGLEWVARIRSKYNNY |
| | -VH | | ATYYADSVKGRFTISRDDSKNTLYLQMNNLKTEDTAVYYCVRHGNFGNSYLSYFAYWG |
| | | | QGTLVTVSS |
| 1301 | G4H_HC_A89L | artificial | QTVVTQEPSLTVSPGGTVTLTCGSSTGAVTSGYYPNWVQQKPGQAPRGLIGGTKFLAP |
| | -VL | | GTPARFSGSLLGGKAALTLSGVQPEDEAEYYCALWYSNRWVFGGGTKLTVL |
| 1302 | G4H_HC_A89T | artificial | EVQLVESGGGLVQPGGSLKLSCAASGFTFNRYAMNWVRQAPGKGLEWVARIRSKYNNY |
| | -VH | | ATYYADSVKGRFTISRDDSKNTTYLQMNNLKTEDTAVYYCVRHGNFGNSYLSYFAYWG |
| | | | QGTLVTVSS |
| 1303 | G4H_HC_A89T | artificial | QTVVTQEPSLTVSPGGTVTLTCGSSTGAVTSGYYPNWVQQKPGQAPRGLIGGTKFLAP |
| | -VL | | GTPARFSGSLLGGKAALTLSGVQPEDEAEYYCALWYSNRWVFGGGTKLTVL |
| 1304 | G4H_HC_A89V | artificial | EVQLVESGGGLVQPGGSLKLSCAASGFTFNRYAMNWVRQAPGKGLEWVARIRSKYNNY |
| | -VH | | ATYYADSVKGRFTISRDDSKNTVYLQMNNLKTEDTAVYYCVRHGNFGNSYLSYFAYWG |
| | | | QGTLVTVSS |
| 1305 | G4H_HC_A89V | artificial | QTVVTQEPSLTVSPGGTVTLTCGSSTGAVTSGYYPNWVQQKPGQAPRGLIGGTKFLAP |
| | -VL | | GTPARFSGSLLGGKAALTLSGVQPEDEAEYYCALWYSNRWVFGGGTKLTVL |
| 1306 | G4H_HC_L52M | artificial | EVQLVESGGGLVQPGGSLKLSCAASGFTFNRYAMNWVRQAPGKGMEWVARIRSKYNNY |
| | -VH | | ATYYADSVKGRFTISRDDSKNTAYLQMNNLKTEDTAVYYCVRHGNFGNSYLSYFAYWG |
| | | | QGTLVTVSS |
| 1307 | G4H_HC_L52M | artificial | QTVVTQEPSLTVSPGGTVTLTCGSSTGAVTSGYYPNWVQQKPGQAPRGLIGGTKFLAP |
| | -VL | | GTPARFSGSLLGGKAALTLSGVQPEDEAEYYCALWYSNRWVFGGGTKLTVL |
| 1308 | G4H_HC_L52M_ | artificial | EVQLVESGGGLVQPGGSLKLSCAASGFTFNRYAMNWVRQAPGKGMEWVARIRSKYNNY |
| | LC_L21I_ | | ATYYADSVKGRFTISRDDSKNTAYLQMNNLKTEDTAVYYCVRHGNFGNSYLSYFAYWG |
| | Q46K_G141S- | | QGTLVTVSS |
| | VH | | |
| 1309 | G4H_HC_L52M_ | artificial | QTVVTQEPSLTVSPGGTVTITCGSSTGAVTSGYYPNWVQKKPGQAPRGLIGGTKFLAP |
| | LC_L21I_ | | GTPARFSGSLLGGKAALTLSGVQPEDEAEYYCALWYSNRWVFGSGTKLTVL |
| | Q46K_G141S- | | |
| | VL | | |
| 1310 | G4H_HC_L52M_ | artificial | EVQLVESGGGLVQPGGSLKLSCAASGFTFNRYAMNWVRQAPGKGMEWVARIRSKYNNY |
| | LC_Q46K- | | ATYYADSVKGRFTISRDDSKNTAYLQMNNLKTEDTAVYYCVRHGNFGNSYLSYFAYWG |
| | VH | | QGTLVTVSS |
| 1311 | G4H_HC_L52M_ | artificial | QTVVTQEPSLTVSPGGTVTLTCGSSTGAVTSGYYPNWVQKKPGQAPRGLIGGTKFLAP |
| | LC_Q46K- | | GTPARFSGSLLGGKAALTLSGVQPEDEAEYYCALWYSNRWVFGGGTKLTVL |
| | VL | | |
| 1312 | G4H_HC_L52M_ | artificial | EVQLVESGGGLVQPGGSLKLSCAASGFTFNRYAMNWVRQAPGKGMEWVARIRSKYNNY |
| | LC_Q46K_ | | ATYYADSVKGRFTISRDDSKNTAYLQMNNLKTEDTAVYYCVRHGNFGNSYLSYFAYWG |
| | G141S-VH | | QGTLVTVSS |
| 1313 | G4H_HC_L52M_ | artificial | QTVVTQEPSLTVSPGGTVTLTCGSSTGAVTSGYYPNWVQKKPGQAPRGLIGGTKFLAP |
| | LC_Q46K_ | | GTPARFSGSLLGGKAALTLSGVQPEDEAEYYCALWYSNRWVFGSGTKLTVL |
| | G141S-VL | | |
| 1314 | G4H_HC_L52V | artificial | EVQLVESGGGLVQPGGSLKLSCAASGFTFNRYAMNWVRQAPGKGVEWVARIRSKYNNY |
| | -VH | | ATYYADSVKGRFTISRDDSKNTAYLQMNNLKTEDTAVYYCVRHGNFGNSYLSYFAYWG |
| | | | QGTLVTVSS |
| 1315 | G4H_HC_L52V | artificial | QTVVTQEPSLTVSPGGTVTLTCGSSTGAVTSGYYPNWVQQKPGQAPRGLIGGTKFLAP |
| | -VL | | GTPARFSGSLLGGKAALTLSGVQPEDEAEYYCALWYSNRWVFGGGTKLTVL |
| 1316 | G4H_HC_L52V | artificial | EVQLVESGGGLVQPGGSLKLSCAASGFTFNRYAMNWVRQAPGKGVEWVARIRSKYNNY |
| | LC_V44F- | | ATYYADSVKGRFTISRDDSKNTAYLQMNNLKTEDTAVYYCVRHGNFGNSYLSYFAYWG |
| | VH | | QGTLVTVSS |
| 1317 | G4H_HC_L52V_ | artificial | QTVVTQEPSLTVSPGGTVTLTCGSSTGAVTSGYYPNWFQQKPGQAPRGLIGGTKFLAP |
| | LC_V44F- | | GTPARFSGSLLGGKAALTLSGVQPEDEAEYYCALWYSNRWVFGGGTKLTVL |
| | VL | | |
| 1318 | G4H_HC_L52V_ | artificial | EVQLVESGGGLVQPGGSLKLSCAASGFTFNRYAMNWVRQAPGKGVEWVARIRSKYNNY |
| | LC_V44Y- | | ATYYADSVKGRFTISRDDSKNTAYLQMNNLKTEDTAVYYCVRHGNFGNSYLSYFAYWG |
| | VH | | QGTLVTVSS |
| 1319 | G4H_HC_L52V_ | artificial | QTVVTQEPSLTVSPGGTVTLTCGSSTGAVTSGYYPNWYQQKPGQAPRGLIGGTKFLAP |
| | LC_V44Y- | | GTPARFSGSLLGGKAALTLSGVQPEDEAEYYCALWYSNRWVFGGGTKLTVL |
| | VL | | |
| 1320 | G4H_HC_M41F_ | artificial | RYAFN |
| | A89V- | | |
| | HCDR1 | | |
| 1321 | G4H_HC_M41F_ | artificial | RIRSKYNNYATYYADSVKG |
| | A89V- | | |
| | HCDR2 | | |
| 1322 | G4H_HC_M41F_ | artificial | HGNFGNSYLSYFAY |
| | A89V-HCDR3 | | |
| 1323 | G4H_HC_M41F_ | artificial | GSSTGAVTSGYYPN |
| | A89V-LCDR1 | | |
| 1324 | G4H_HC_M41F_ | artificial | GTKFLAP |
| | A89V-LCDR2 | | |
| 1325 | G4H_HC_M41F_ | artificial | ALWYSNRWV |
| | A89V-LCDR3 | | |
| 1326 | G4H_HC_M41F_ | artificial | EVQLVESGGGLVQPGGSLKLSCAASGFTFNRYAFNWVRQAPGKGLEWVARIRSKYNNY |
| | A89V-VH | | ATYYADSVKGRFTISRDDSKNTVYLQMNNLKTEDTAVYYCVRHGNFGNSYLSYFAYWG |
| | | | QGTLVTVSS |
| 1327 | G4H_HC_M41F_ | artificial | QTVVTQEPSLTVSPGGTVTLTCGSSTGAVTSGYYPNWVQQKPGQAPRGLIGGTKFLAP |
| | A89V-VL | | GTPARFSGSLLGGKAALTLSGVQPEDEAEYYCALWYSNRWVFGGGTKLTVL |
| 1328 | G4H_HC_M41I | artificial | RYAIN |
| | -HCDR1 | | |
| 1329 | G4H_HC_M41I | artificial | RIRSKYNNYATYYADSVKG |
| | -HCDR2 | | |
| 1330 | G4H_HC_M41I | artificial | HGNFGNSYLSYFAY |
| | -HCDR3 | | |
| 1331 | G4H_HC_M41I | artificial | GSSTGAVTSGYYPN |
| | -LCDR1 | | |
| 1332 | G4H_HC_M41I | artificial | GTKFLAP |
| | -LCDR2 | | |
| 1333 | G4H_HC_M41I | artificial | ALWYSNRWV |
| | -LCDR3 | | |
| 1334 | G4H_HC_M41I | artificial | EVQLVESGGGLVQPGGSLKLSCAASGFTFNRYAINWVRQAPGKGLEWVARIRSKYNNY |
| | -VH | | ATYYADSVKGRFTISRDDSKNTAYLQMNNLKTEDTAVYYCVRHGNFGNSYLSYFAYWG |
| | | | QGTLVTVSS |
| 1335 | G4H_HC_M41I | artificial | QTVVTQEPSLTVSPGGTVTLTCGSSTGAVTSGYYPNWVQQKPGQAPRGLIGGTKFLAP |
| | -VL | | GTPARFSGSLLGGKAALTLSGVQPEDEAEYYCALWYSNRWVFGGGTKLTVL |
| 1336 | G4H_HC_M41I_ | artificial | EVQLVESGGGLVQPGGSLKLSCAASGFTFNRYAINWVRQAPGKGLEWVARIRSKYNNY |
| | A89L-VH | | ATYYADSVKGRFTISRDDSKNTLYLQMNNLKTEDTAVYYCVRHGNFGNSYLSYFAYWG |
| | | | QGTLVTVSS |
| 1337 | G4H_HC_M41I_ | artificial | QTVVTQEPSLTVSPGGTVTLTCGSSTGAVTSGYYPNWVQQKPGQAPRGLIGGTKFLAP |
| | A89L-VL | | GTPARFSGSLLGGKAALTLSGVQPEDEAEYYCALWYSNRWVFGGGTKLTVL |
| 1338 | G4H_HC_M41I_ | artificial | EVQLVESGGGLVQPGGSLKLSCAASGFTFNRYAINWVRQAPGKGLEWVARIRSKYNNY |
| | A89V-VH | | ATYYADSVKGRFTISRDDSKNTVYLQMNNLKTEDTAVYYCVRHGNFGNSYLSYFAYWG |
| | | | QGTLVTVSS |
| 1339 | G4H_HC_M41I_ | artificial | QTVVTQEPSLTVSPGGTVTLTCGSSTGAVTSGYYPNWVQQKPGQAPRGLIGGTKFLAP |
| | A89V-VL | | GTPARFSGSLLGGKAALTLSGVQPEDEAEYYCALWYSNRWVFGGGTKLTVL |
| 1340 | G4H_HC_M41I_ | artificial | EVQLVESGGGLVQPGGSLKLSCAASGFTFNRYAINWVRQAPGKGLEWVARIRSKYNNY |
| | A89V_LC_ | | ATYYADSVKGRFTISRDDSKNTVYLQMNNLKTEDTAVYYCVRHGNFGNSYLSYFAYWG |
| | L21I_Q46K_ | | QGTLVTVSS |
| | G141S-VH | | |
| 1341 | G4H_HC_M41I_ | artificial | QTVVTQEPSLTVSPGGTVTITCGSSTGAVTSGYYPNWVQKKPGQAPRGLIGGTKFLAP |
| | A89V_LC_ | | GTPARFSGSLLGGKAALTLSGVQPEDEAEYYCALWYSNRWVFGSGTKLTVL |
| | L21I_Q46K_ | | |
| | 1G14S-VL | | |
| 1342 | G4H_HC_M41I_ | artificial | EVQLVESGGGLVQPGGSLKLSCAASGFTFNRYAINWVRQAPGKGLEWVARIRSKYNNY |
| | A89V_LC_ | | ATYYADSVKGRFTISRDDSKNTVYLQMNNLKTEDTAVYYCVRHGNFGNSYLSYFAYWG |
| | Q46K-VH | | QGTLVTVSS |
| 1343 | G4H_HC_M41I_ | artificial | QTVVTQEPSLTVSPGGTVTLTCGSSTGAVTSGYYPNWVQKKPGQAPRGLIGGTKFLAP |
| | A89V_LC_ | | GTPARFSGSLLGGKAALTLSGVQPEDEAEYYCALWYSNRWVFGGGTKLTVL |
| | Q46K-VL | | |
| 1344 | G4H_HC_M41I_ | artificial | EVQLVESGGGLVQPGGSLKLSCAASGFTFNRYAINWVRQAPGKGVEWVARIRSKYNNY |
| | L52V_A89V_ | | ATYYADSVKGRFTISRDDSKNTVYLQMNNLKTEDTAVYYCVRHGNFGNSYLSYFAYWG |
| | LC_L21I_ | | QGTLVTVSS |
| | Q46K_G141S_ | | |
| | V44F-VH | | |
| 1345 | G4H_HC_M41I_ | artificial | QTVVTQEPSLTVSPGGTVTITCGSSTGAVTSGYYPNWFQKKPGQAPRGLIGGTKFLAP |
| | L52V_A89V_ | | GTPARFSGSLLGGKAALTLSGVQPEDEAEYYCALWYSNRWVFGSGTKLTVL |
| | LC_L21I_ | | |
| | Q46K_G141S_ | | |
| | V44F-VL | | |
| 1346 | G4H_HC_M41I_ | artificial | EVQLVESGGGLVQPGGSLKLSCAASGFTFNRYAINWVRQAPGKGLEWVARIRSKYNNY |
| | LC_L21I_ | | ATYYADSVKGRFTISRDDSKNTAYLQMNNLKTEDTAVYYCVRHGNFGNSYLSYFAYWG |
| | Q46K_G141S- | | QGTLVTVSS |
| | VH | | |
| 1347 | G4H_HC_M41I_ | artificial | QTVVTQEPSLTVSPGGTVTITCGSSTGAVTSGYYPNWVQKKPGQAPRGLIGGTKFLAP |
| | LC_L21I_ | | GTPARFSGSLLGGKAALTLSGVQPEDEAEYYCALWYSNRWVFGSGTKLTVL |
| | Q46K_G141S- | | |
| | VL | | |
| 1348 | G4H_HC_M41I_ | artificial | EVQLVESGGGLVQPGGSLKLSCAASGFTFNRYAINWVREAPGKGLEWVARIRSKYNNY |
| | Q46E_A89V_ | | ATYYADSVKGRFTISRDDSKNTVYLQMNNLKTEDTAVYYCVRHGNFGNSYLSYFAYWG |
| | LC_L21I_ | | QGTLVTVSS |
| | Q46K_G141S- | | |
| | VH | | |
| 1349 | G4H_HC_M41I_ | artificial | QTVVTQEPSLTVSPGGTVTITCGSSTGAVTSGYYPNWVQKKPGQAPRGLIGGTKFLAP |
| | Q46E_A89V_ | | GTPARFSGSLLGGKAALTLSGVQPEDEAEYYCALWYSNRWVFGSGTKLTVL |
| | LC_L21I_ | | |
| | Q46K_G141S- | | |
| | VL | | |
| 1350 | G4H_HC_M41V | artificial | RYAVN |
| | -HCDR1 | | |
| 1351 | G4H_HC_M41V | artificial | RIRSKYNNYATYYADSVKG |
| | -HCDR2 | | |
| 1352 | G4H_HC_M41V | artificial | HGNFGNSYLSYFAY |
| | -HCDR3 | | |
| 1353 | G4H_HC_M41V | artificial | GSSTGAVTSGYYPN |
| | -LCDR1 | | |
| 1354 | G4H_HC_M41V | artificial | GTKFLAP |
| | -LCDR2 | | |
| 1355 | G4H_HC_M41V | artificial | ALWYSNRWV |
| | -LCDR3 | | |
| 1356 | G4H_HC_M41V | artificial | EVQLVESGGGLVQPGGSLKLSCAASGFTFNRYAVNWVRQAPGKGLEWVARIRSKYNNY |
| | -VH | | ATYYADSVKGRFTISRDDSKNTAYLQMNNLKTEDTAVYYCVRHGNFGNSYLSYFAYWG |
| | | | QGTLVTVSS |
| 1357 | G4H_HC_M41V | artificial | QTVVTQEPSLTVSPGGTVTLTCGSSTGAVTSGYYPNWVQQKPGQAPRGLIGGTKFLAP |
| | -VL | | GTPARFSGSLLGGKAALTLSGVQPEDEAEYYCALWYSNRWVFGGGTKLTVL |
| 1358 | G4H_HC_Q46D | artificial | EVQLVESGGGLVQPGGSLKLSCAASGFTFNRYAMNWVRDAPGKGLEWVARIRSKYNNY |
| | -VH | | ATYYADSVKGRFTISRDDSKNTAYLQMNNLKTEDTAVYYCVRHGNFGNSYLSYFAYWG |
| | | | QGTLVTVSS |
| 1359 | G4H_HC_Q46D | artificial | QTVVTQEPSLTVSPGGTVTLTCGSSTGAVTSGYYPNWVQQKPGQAPRGLIGGTKFLAP |
| | -VL | | GTPARFSGSLLGGKAALTLSGVQPEDEAEYYCALWYSNRWVFGGGTKLTVL |
| 1360 | G4H_HC_Q46D_ | artificial | EVQLVESGGGLVQPGGSLKLSCAASGFTFNRYAMNWVRDAPGKGLEWVARIRSKYNNY |
| | LC_L21I_ | | ATYYADSVKGRFTISRDDSKNTAYLQMNNLKTEDTAVYYCVRHGNFGNSYLSYFAYWG |
| | Q46K_G141S- | | QGTLVTVSS |
| | VH | | |
| 1361 | G4H_HC_Q46D_ | artificial | QTVVTQEPSLTVSPGGTVTITCGSSTGAVTSGYYPNWVQKKPGQAPRGLIGGTKFLAP |
| | LC_L21I_ | | GTPARFSGSLLGGKAALTLSGVQPEDEAEYYCALWYSNRWVFGSGTKLTVL |
| | Q46K_G141S- | | |
| | VL | | |
| 1362 | G4H_HC_Q46D_ | artificial | EVQLVESGGGLVQPGGSLKLSCAASGFTFNRYAMNWVRDAPGKGLEWVARIRSKYNNY |
| | LC_L21I_ | | ATYYADSVKGRFTISRDDSKNTAYLQMNNLKTEDTAVYYCVRHGNFGNSYLSYFAYWG |
| | Q46R_G141S- | | QGTLVTVSS |
| | VH | | |
| 1363 | G4H_HC_Q46D_ | artificial | QTVVTQEPSLTVSPGGTVTITCGSSTGAVTSGYYPNWVQRKPGQAPRGLIGGTKFLAP |
| | LC_L21I_ | | GTPARFSGSLLGGKAALTLSGVQPEDEAEYYCALWYSNRWVFGSGTKLTVL |
| | Q46R_G141S- | | |
| | VL | | |
| 1364 | G4H_HC_Q46D_ | artificial | EVQLVESGGGLVQPGGSLKLSCAASGFTFNRYAMNWVRDAPGKGLEWVARIRSKYNNY |
| | LC_Q46K- | | ATYYADSVKGRFTISRDDSKNTAYLQMNNLKTEDTAVYYCVRHGNFGNSYLSYFAYWG |
| | VH | | QGTLVTVSS |
| 1365 | G4H_HC_Q46D_ | artificial | QTVVTQEPSLTVSPGGTVTLTCGSSTGAVTSGYYPNWVQKKPGQAPRGLIGGTKFLAP |
| | LC_Q46K- | | GTPARFSGSLLGGKAALTLSGVQPEDEAEYYCALWYSNRWVFGGGTKLTVL |
| | VL | | |
| 1366 | G4H_HC_Q46D_ | artificial | EVQLVESGGGLVQPGGSLKLSCAASGFTFNRYAMNWVRDAPGKGLEWVARIRSKYNNY |
| | LC_Q46K_ | | ATYYADSVKGRFTISRDDSKNTAYLQMNNLKTEDTAVYYCVRHGNFGNSYLSYFAYWG |
| | G141S-VH | | QGTLVTVSS |
| 1367 | G4H_HC_Q46D_ | artificial | QTVVTQEPSLTVSPGGTVTLTCGSSTGAVTSGYYPNWVQKKPGQAPRGLIGGTKFLAP |
| | LC_Q46K_ | | GTPARFSGSLLGGKAALTLSGVQPEDEAEYYCALWYSNRWVFGSGTKLTVL |
| | G141S-VL | | |
| 1368 | G4H_HC_Q46D_ | artificial | EVQLVESGGGLVQPGGSLKLSCAASGFTFNRYAMNWVRDAPGKGLEWVARIRSKYNNY |
| | LC_Q46R- | | ATYYADSVKGRFTISRDDSKNTAYLQMNNLKTEDTAVYYCVRHGNFGNSYLSYFAYWG |
| | VH | | QGTLVTVSS |
| 1369 | G4H_HC_Q46D_ | artificial | QTVVTQEPSLTVSPGGTVTLTCGSSTGAVTSGYYPNWVQRKPGQAPRGLIGGTKFLAP |
| | LC_Q46R- | | GTPARFSGSLLGGKAALTLSGVQPEDEAEYYCALWYSNRWVFGGGTKLTVL |
| | VL | | |
| 1370 | G4H_HC_Q46D_ | artificial | EVQLVESGGGLVQPGGSLKLSCAASGFTFNRYAMNWVRDAPGKGLEWVARIRSKYNNY |
| | LC_Q46R_ | | ATYYADSVKGRFTISRDDSKNTAYLQMNNLKTEDTAVYYCVRHGNFGNSYLSYFAYWG |
| | G141S-VH | | QGTLVTVSS |
| 1371 | G4H_HC_Q46D_ | artificial | QTVVTQEPSLTVSPGGTVTLTCGSSTGAVTSGYYPNWVQRKPGQAPRGLIGGTKFLAP |
| | LC_Q46R_ | | GTPARFSGSLLGGKAALTLSGVQPEDEAEYYCALWYSNRWVFGSGTKLTVL |
| | G141S-VL | | |
| 1372 | G4H_HC_Q46E | artificial | EVQLVESGGGLVQPGGSLKLSCAASGFTFNRYAMNWVREAPGKGLEWVARIRSKYNNY |
| | -VH | | ATYYADSVKGRFTISRDDSKNTAYLQMNNLKTEDTAVYYCVRHGNFGNSYLSYFAYWG |
| | | | QGTLVTVSS |
| 1373 | G4H_HC_Q46E | artificial | QTVVTQEPSLTVSPGGTVTLTCGSSTGAVTSGYYPNWVQQKPGQAPRGLIGGTKFLAP |
| | -VL | | GTPARFSGSLLGGKAALTLSGVQPEDEAEYYCALWYSNRWVFGGGTKLTVL |
| 1374 | G4H_HC_Q46E_ | artificial | EVQLVESGGGLVQPGGSLKLSCAASGFTFNRYAMNWVREAPGKGLEWVARIRSKYNNY |
| | LC_L21I_ | | ATYYADSVKGRFTISRDDSKNTAYLQMNNLKTEDTAVYYCVRHGNFGNSYLSYFAYWG |
| | Q46K_G141S- | | QGTLVTVSS |
| | VH | | |
| 1375 | G4H_HC_Q46E_ | artificial | QTVVTQEPSLTVSPGGTVTITCGSSTGAVTSGYYPNWVQKKPGQAPRGLIGGTKFLAP |
| | LC_L21I_ | | GTPARFSGSLLGGKAALTLSGVQPEDEAEYYCALWYSNRWVFGSGTKLTVL |
| | Q46K_G141S- | | |
| | VL | | |
| 1376 | G4H_HC_Q46E_ | artificial | EVQLVESGGGLVQPGGSLKLSCAASGFTFNRYAMNWVREAPGKGLEWVARIRSKYNNY |
| | LC_L21I_ | | ATYYADSVKGRFTISRDDSKNTAYLQMNNLKTEDTAVYYCVRHGNFGNSYLSYFAYWG |
| | 6Q4R_G141S- | | QGTLVTVSS |
| | VH | | |
| 1377 | G4H_HC_Q46E_ | artificial | QTVVTQEPSLTVSPGGTVTITCGSSTGAVTSGYYPNWVQRKPGQAPRGLIGGTKFLAP |
| | LC_L21I_ | | GTPARFSGSLLGGKAALTLSGVQPEDEAEYYCALWYSNRWVFGSGTKLTVL |
| | Q46R_G141S- | | |
| | VL | | |
| 1378 | G4H_HC_Q46E_ | artificial | EVQLVESGGGLVQPGGSLKLSCAASGFTFNRYAMNWVREAPGKGLEWVARIRSKYNNY |
| | LC_Q46K- | | ATYYADSVKGRFTISRDDSKNTAYLQMNNLKTEDTAVYYCVRHGNFGNSYLSYFAYWG |
| | VH | | QGTLVTVSS |
| 1379 | G4H_HC_Q46E_ | artificial | QTVVTQEPSLTVSPGGTVTLTCGSSTGAVTSGYYPNWVQKKPGQAPRGLIGGTKFLAP |
| | LC_Q46K- | | GTPARFSGSLLGGKAALTLSGVQPEDEAEYYCALWYSNRWVFGGGTKLTVL |
| | VL | | |
| 1380 | G4H_HC_Q46E_ | artificial | EVQLVESGGGLVQPGGSLKLSCAASGFTFNRYAMNWVREAPGKGLEWVARIRSKYNNY |
| | LC_Q46K_ | | ATYYADSVKGRFTISRDDSKNTAYLQMNNLKTEDTAVYYCVRHGNFGNSYLSYFAYWG |
| | 4G11S-VH | | QGTLVTVSS |
| 1381 | G4H_HC_Q46E_ | artificial | QTVVTQEPSLTVSPGGTVTLTCGSSTGAVTSGYYPNWVQKKPGQAPRGLIGGTKFLAP |
| | LC_Q46K_ | | GTPARFSGSLLGGKAALTLSGVQPEDEAEYYCALWYSNRWVFGSGTKLTVL |
| | G141S-VL | | |
| 1382 | G4H_HC_Q46E_ | artificial | EVQLVESGGGLVQPGGSLKLSCAASGFTFNRYAMNWVREAPGKGLEWVARIRSKYNNY |
| | LC_Q46R- | | ATYYADSVKGRFTISRDDSKNTAYLQMNNLKTEDTAVYYCVRHGNFGNSYLSYFAYWG |
| | VH | | QGTLVTVSS |
| 1383 | G4H_HC_Q46E_ | artificial | QTVVTQEPSLTVSPGGTVTLTCGSSTGAVTSGYYPNWVQRKPGQAPRGLIGGTKFLAP |
| | LC_Q46R- | | GTPARFSGSLLGGKAALTLSGVQPEDEAEYYCALWYSNRWVFGGGTKLTVL |
| | VL | | |
| 1384 | G4H_HC_Q46E_ | artificial | EVQLVESGGGLVQPGGSLKLSCAASGFTFNRYAMNWVREAPGKGLEWVARIRSKYNNY |
| | LC_Q46R_ | | ATYYADSVKGRFTISRDDSKNTAYLQMNNLKTEDTAVYYCVRHGNFGNSYLSYFAYWG |
| | G141S-VH | | QGTLVTVSS |
| 1385 | G4H_HC_Q46E_ | artificial | QTVVTQEPSLTVSPGGTVTLTCGSSTGAVTSGYYPNWVQRKPGQAPRGLIGGTKFLAP |
| | LC_Q46R_ | | GTPARFSGSLLGGKAALTLSGVQPEDEAEYYCALWYSNRWVFGSGTKLTVL |
| | G141S-VL | | |
| 1386 | G4H_HC_Q46K | artificial | EVQLVESGGGLVQPGGSLKLSCAASGFTFNRYAMNWVRKAPGKGLEWVARIRSKYNNY |
| | -VH | | ATYYADSVKGRFTISRDDSKNTAYLQMNNLKTEDTAVYYCVRHGNFGNSYLSYFAYWG |
| | | | QGTLVTVSS |
| 1387 | G4H_HC_Q46K | artificial | QTVVTQEPSLTVSPGGTVTLTCGSSTGAVTSGYYPNWVQQKPGQAPRGLIGGTKFLAP |
| | -VL | | GTPARFSGSLLGGKAALTLSGVQPEDEAEYYCALWYSNRWVFGGGTKLTVL |
| 1388 | G4H_HC_Q46R | artificial | EVQLVESGGGLVQPGGSLKLSCAASGFTFNRYAMNWVRRAPGKGLEWVARIRSKYNNY |
| | -VH | | ATYYADSVKGRFTISRDDSKNTAYLQMNNLKTEDTAVYYCVRHGNFGNSYLSYFAYWG |
| | | | QGTLVTVSS |
| 1389 | G4H_HC_Q46R | artificial | QTVVTQEPSLTVSPGGTVTLTCGSSTGAVTSGYYPNWVQQKPGQAPRGLIGGTKFLAP |
| | -VL | | GTPARFSGSLLGGKAALTLSGVQPEDEAEYYCALWYSNRWVFGGGTKLTVL |
| 1390 | G4H_HC_V107 | artificial | EVQLVESGGGLVQPGGSLKLSCAASGFTFNRYAMNWVRQAPGKGLEWVARIRSKYNNY |
| | A-VH | | ATYYADSVKGRFTISRDDSKNTAYLQMNNLKTEDTAVYYCARHGNFGNSYLSYFAYWG |
| | | | QGTLVTVSS |
| 1391 | G4H_HC_V107A- | artificial | QTVVTQEPSLTVSPGGTVTLTCGSSTGAVTSGYYPNWVQQKPGQAPRGLIGGTKFLAP |
| | VL | | GTPARFSGSLLGGKAALTLSGVQPEDEAEYYCALWYSNRWVFGGGTKLTVL |
| 1392 | G4H_HC_V107L- | artificial | EVQLVESGGGLVQPGGSLKLSCAASGFTFNRYAMNWVRQAPGKGLEWVARIRSKYNNY |
| | VH | | ATYYADSVKGRFTISRDDSKNTAYLQMNNLKTEDTAVYYCLRHGNFGNSYLSYFAYWG |
| | | | QGTLVTVSS |
| 1393 | G4H_HC_V107L- | artificial | QTVVTQEPSLTVSPGGTVTLTCGSSTGAVTSGYYPNWVQQKPGQAPRGLIGGTKFLAP |
| | VL | | GTPARFSGSLLGGKAALTLSGVQPEDEAEYYCALWYSNRWVFGGGTKLTVL |
| 1394 | G4H_I2E- | artificial | RYAIN |
| | HCDR1 | | |
| 1395 | G4H_I2E- | artificial | RIRSKYNNYATYYADAVKG |
| | HCDR2 | | |
| 1396 | G4H_I2E- | artificial | AGNFGSSYLSYFAY |
| | HCDR3 | | |
| 1397 | G4H_I2E- | artificial | GSSTGAVTSGYYPN |
| | LCDR1 | | |
| 1398 | G4H_I2E- | artificial | GTKFLAP |
| | LCDR2 | | |
| 1399 | G4H_I2E- | artificial | ALWYSNRWV |
| | LCDR3 | | |
| 1400 | G4H_I2E- | artificial | EVQLVESGGGLVQPGGSLKLSCAASGFTFNRYAINWVRQAPGKGLEWVARIRSKYNNY |
| | VH | | ATYYADAVKGRFTISRDDSKNTVYLQMNNLKTEDTAVYYCARAGNFGSSYLSYFAYWG |
| | | | QGTLVTVSS |
| 1401 | G4H_I2E- | artificial | QTVVTQEPSLTVSPGGTVTITCGSSTGAVTSGYYPNWVQKKPGQAPRGLIGGTKFLAP |
| | VL | | GTPARFSGSLSGGKAALTLSGVQPEDEAEYYCALWYSNRWVFGSGTKLTVL |
| 1402 | G4H_I2K- | artificial | RYAMN |
| | HCDR1 | | |
| 1403 | G4H_I2K- | artificial | RIRSKYNNYATYYAEAVKG |
| | HCDR2 | | |
| 1404 | G4H_I2K- | artificial | NENIGTSYLSYFAY |
| | HCDR3 | | |
| 1405 | G4H_I2K- | artificial | GSSTGAVTSGYYPN |
| | LCDR1 | | |
| 1406 | G4H_I2K- | artificial | GTKFLAP |
| | LCDR2 | | |
| 1407 | G4H_I2K- | artificial | ALWYSNRWV |
| | LCDR3 | | |
| 1408 | G4H_I2K- | artificial | EVQLVESGGGLVQPGGSLKLSCAASGFTFNRYAMNWVRQAPGKGLEWVARIRSKYNNY |
| | VH | | ATYYAEAVKGRFTISRDDSKNTVYLQMNNLKTEDTAVYYCVRNENIGTSYLSYFAYWG |
| | | | QGTLVTVSS |
| 1409 | G4H_I2K- | artificial | QTVVTQEPSLTVSPGGTVTITCGSSTGAVTSGYYPNWVQQKPGQAPRGLIGGTKFLAP |
| | VL | | GTPARFSGSLSGGKAALTLSGVQPEDEAEYYCALWYSNRWVFGSGTKLTVL |
| 1410 | G4H_I2L- | artificial | RYAMN |
| | HCDR1 | | |
| 1411 | G4H_I2L- | artificial | RIRSKYNNYATYYADAVKG |
| | HCDR2 | | |
| 1412 | G4H_I2L- | artificial | AGNFGSSYLSYFAY |
| | HCDR3 | | |
| 1413 | G4H_I2L- | artificial | GSSTGAVTSGYYPN |
| | LCDR1 | | |
| 1414 | G4H_I2L- | artificial | GTKFLAP |
| | LCDR2 | | |
| 1415 | G4H_I2L- | artificial | ALYYSNRWV |
| | LCDR3 | | |
| 1416 | G4H_I2L- | artificial | EVQLVESGGGLVQPGGSLKLSCAASGFTFNRYAMNWVRQAPGKGMEWVARIRSKYNNY |
| | VH | | ATYYADAVKGRFTISRDDSKNTLYLQMNNLKTEDTAVYYCVRAGNFGSSYLSYFAYWG |
| | | | QGTLVTVSS |
| 1417 | G4H_I2L- | artificial | QTVVTQEPSLTVSPGGTVTITCGSSTGAVTSGYYPNWIQKKPGQAPRGLIGGTKFLAP |
| | VL | | GTPARFSGSLEGGKAALTLSGVQPEDEAEYYCALYYSNRWVFGSGTKLTVL |
| 1418 | G4H_I2M- | artificial | RYAMN |
| | HCDR1 | | |
| 1419 | G4H_I2M- | artificial | RIRSKYNNYATYYADAVKG |
| | HCDR2 | | |
| 1420 | G4H_I2M- | artificial | AGNFGTSYLSYFAY |
| | HCDR3 | | |
| 1421 | G4H_I2M- | artificial | GSSTGAVTSGYYPN |
| | LCDR1 | | |
| 1422 | G4H_I2M- | artificial | GTKFLAP |
| | LCDR2 | | |
| 1423 | G4H_I2M- | artificial | ALWYSNRWV |
| | LCDR3 | | |
| 1424 | G4H_I2M | artificial | EVQLVESGGGLVQPGGSLKLSCAASGFTFNRYAMNWVRQAPGKGMEWVARIRSKYNNY |
| | VH | | ATYYADAVKGRFTISRDDSKNTLYLQMNNLKTEDTAVYYCVRAGNFGTSYLSYFAYWG |
| | | | QGTLVTVSS |
| 1425 | G4H_I2M- | artificial | QTVVTQEPSLTVSPGGTVTITCGSSTGAVTSGYYPNWVQKKPGQAPRGLIGGTKFLAP |
| | VL | | GTPARFSGSLSGGKAALTLSGVQPEDEAEYYCALWYSNRWVFGSGTKLTVL |
| 1426 | G4H_I2M2- | artificial | RYAIN |
| | HCDR1 | | |
| 1427 | G4H_I2M2- | artificial | RIRSKYNNYATYYADAVKG |
| | HCDR2 | | |
| 1428 | G4H_I2M2- | artificial | NANFGTSYLSYFAY |
| | HCDR3 | | |
| 1429 | G4H_I2M2- | artificial | GSSTGAVTSGYYPN |
| | LCDR1 | | |
| 1430 | G4H_I2M2- | artificial | GTKFLAP |
| | LCDR2 | | |
| 1431 | G4H_I2M2- | artificial | ALWYSNRWV |
| | LCDR3 | | |
| 1432 | G4H_I2M2- | artificial | EVQLVESGGGLVQPGGSLKLSCAASGFTFNRYAINWVREAPGKGLEWVARIRSKYNNY |
| | VH | | ATYYADAVKGRFTISRDDSKNTAYLQMNNLKTEDTAVYYCVRNANFGTSYLSYFAYWG |
| | | | QGTLVTVSS |
| 1433 | G4H_I2M2 | artificial | QTVVTQEPSLTVSPGGTVTLTCGSSTGAVTSGYYPNWVQKKPGQAPRGLIGGTKFLAP |
| | VL | | GTPARFSGSLLGGKAALTLSGVQPEDEAEYYCALWYSNRWVFGSGTKLTVL |
| 1434 | G4H_LC_G141S- | artificial | EVQLVESGGGLVQPGGSLKLSCAASGFTFNRYAMNWVRQAPGKGLEWVARIRSKYNNY |
| | VH | | ATYYADSVKGRFTISRDDSKNTAYLQMNNLKTEDTAVYYCVRHGNFGNSYLSYFAYWG |
| | | | QGTLVTVSS |
| 1435 | G4H_LC_G141S- | artificial | QTVVTQEPSLTVSPGGTVTLTCGSSTGAVTSGYYPNWVQQKPGQAPRGLIGGTKFLAP |
| | VL | | GTPARFSGSLLGGKAALTLSGVQPEDEAEYYCALWYSNRWVFGSGTKLTVL |
| 1436 | G4H_LC_G141S_ | artificial | EVQLVESGGGLVQPGGSLKLSCAASGFTFNRYAMNWVRQAPGKGLEWVARIRSKYNNY |
| | L21I-VH | | ATYYADSVKGRFTISRDDSKNTAYLQMNNLKTEDTAVYYCVRHGNFGNSYLSYFAYWG |
| | | | QGTLVTVSS |
| 1437 | G4H_LC_G141S_ | artificial | QTVVTQEPSLTVSPGGTVTITCGSSTGAVTSGYYPNWVQQKPGQAPRGLIGGTKFLAP |
| | L21I-VL | | GTPARFSGSLLGGKAALTLSGVQPEDEAEYYCALWYSNRWVFGSGTKLTVL |
| 1438 | G4H_LC_L83E | artificial | EVQLVESGGGLVQPGGSLKLSCAASGFTFNRYAMNWVRQAPGKGLEWVARIRSKYNNY |
| | -VH | | ATYYADSVKGRFTISRDDSKNTAYLQMNNLKTEDTAVYYCVRHGNFGNSYLSYFAYWG |
| | | | QGTLVTVSS |
| 1439 | G4H_LC_L83E | artificial | QTVVTQEPSLTVSPGGTVTLTCGSSTGAVTSGYYPNWVQQKPGQAPRGLIGGTKFLAP |
| | -VL | | GTPARFSGSLEGGKAALTLSGVQPEDEAEYYCALWYSNRWVFGGGTKLTVL |
| 1440 | G4H_LC_L83S | artificial | EVQLVESGGGLVQPGGSLKLSCAASGFTFNRYAMNWVRQAPGKGLEWVARIRSKYNNY |
| | -VH | | ATYYADSVKGRFTISRDDSKNTAYLQMNNLKTEDTAVYYCVRHGNFGNSYLSYFAYWG |
| | | | QGTLVTVSS |
| 1441 | G4H_LC_L83S | artificial | QTVVTQEPSLTVSPGGTVTLTCGSSTGAVTSGYYPNWVQQKPGQAPRGLIGGTKFLAP |
| | -VL | | GTPARFSGSLSGGKAALTLSGVQPEDEAEYYCALWYSNRWVFGGGTKLTVL |
| 1442 | G4H_LC_Q46E | artificial | EVQLVESGGGLVQPGGSLKLSCAASGFTENRYAMNWVRQAPGKGLEWVARIRSKYNNY |
| | -VH | | ATYYADSVKGRFTISRDDSKNTAYLQMNNLKTEDTAVYYCVRHGNFGNSYLSYFAYWG |
| | | | QGTLVTVSS |
| 1443 | G4H_LC_Q46E | artificial | QTVVTQEPSLTVSPGGTVTLTCGSSTGAVTSGYYPNWVQEKPGQAPRGLIGGTKFLAP |
| | -VL | | GTPARFSGSLLGGKAALTLSGVQPEDEAEYYCALWYSNRWVFGGGTKLTVL |
| 1444 | G4H_LC_Q46K | artificial | EVQLVESGGGLVQPGGSLKLSCAASGFTFNRYAMNWVRQAPGKGLEWVARIRSKYNNY |
| | -VH | | ATYYADSVKGRFTISRDDSKNTAYLQMNNLKTEDTAVYYCVRHGNFGNSYLSYFAYWG |
| | | | QGTLVTVSS |
| 1445 | G4H_LC_Q46K | artificial | QTVVTQEPSLTVSPGGTVTLTCGSSTGAVTSGYYPNWVQKKPGQAPRGLIGGTKFLAP |
| | -VL | | GTPARFSGSLLGGKAALTLSGVQPEDEAEYYCALWYSNRWVFGGGTKLTVL |
| 1446 | G4H_LC_A107L- | artificial | RYAMN |
| | HCDR1 | | |
| 1447 | G4H_LC_A107L- | artificial | RIRSKYNNYATYYADSVKG |
| | HCDR2 | | |
| 1448 | G4H_LC_A107L- | artificial | HGNFGNSYLSYFAY |
| | HCDR3 | | |
| 1449 | G4H_LC_A107L- | artificial | GSSTGAVTSGYYPN |
| | LCDR1 | | |
| 1450 | G4H_LC_A107L- | artificial | GTKFLAP |
| | LCDR2 | | |
| 1451 | G4H_LC_A107L- | artificial | LLWYSNRWV |
| | LCDR3 | | |
| 1452 | G4H_LC_A107L- | artificial | EVQLVESGGGLVQPGGSLKLSCAASGFTFNRYAMNWVRQAPGKGLEWVARIRSKYNNY |
| | VH | | ATYYADSVKGRFTISRDDSKNTAYLQMNNLKTEDTAVYYCVRHGNFGNSYLSYFAYWG |
| | | | QGTLVTVSS |
| 1453 | G4H_LC_A107L- | artificial | QTVVTQEPSLTVSPGGTVTLTCGSSTGAVTSGYYPNWVQQKPGQAPRGLIGGTKFLAP |
| | VL | | GTPARFSGSLLGGKAALTLSGVQPEDEAEYYCLLWYSNRWVFGGGTKLTVL |
| 1454 | G4H_LC_V44I | artificial | EVQLVESGGGLVQPGGSLKLSCAASGFTFNRYAMNWVRQAPGKGLEWVARIRSKYNNY |
| | -VH | | ATYYADSVKGRFTISRDDSKNTAYLQMNNLKTEDTAVYYCVRHGNFGNSYLSYFAYWG |
| | | | QGTLVTVSS |
| 1455 | G4H_LC_V44I | artificial | QTVVTQEPSLTVSPGGTVTLTCGSSTGAVTSGYYPNWIQQKPGQAPRGLIGGTKFLAP |
| | -VL | | GTPARFSGSLLGGKAALTLSGVQPEDEAEYYCALWYSNRWVFGGGTKLTVL |
| 1456 | G4H_LC_V44L | artificial | EVQLVESGGGLVQPGGSLKLSCAASGFTFNRYAMNWVRQAPGKGLEWVARIRSKYNNY |
| | -VH | | ATYYADSVKGRFTISRDDSKNTAYLQMNNLKTEDTAVYYCVRHGNFGNSYLSYFAYWG |
| | | | QGTLVTVSS |
| 1457 | G4H_LC_V44L | artificial | QTVVTQEPSLTVSPGGTVTLTCGSSTGAVTSGYYPNWLQQKPGQAPRGLIGGTKFLAP |
| | -VL | | GTPARFSGSLLGGKAALTLSGVQPEDEAEYYCALWYSNRWVFGGGTKLTVL |
| 1458 | G4H_LC_V44M | artificial | EVQLVESGGGLVQPGGSLKLSCAASGFTFNRYAMNWVRQAPGKGLEWVARIRSKYNNY |
| | -VH | | ATYYADSVKGRFTISRDDSKNTAYLQMNNLKTEDTAVYYCVRHGNFGNSYLSYFAYWG |
| | | | QGTLVTVSS |
| 1459 | G4H_LC_V44M | artificial | QTVVTQEPSLTVSPGGTVTLTCGSSTGAVTSGYYPNWMQQKPGQAPRGLIGGTKFLAP |
| | -VL | | GTPARFSGSLLGGKAALTLSGVQPEDEAEYYCALWYSNRWVFGGGTKLTVL |
| 1460 | G4H_LC_W109Y- | artificial | RYAMN |
| | HCDR1 | | |
| 1461 | G4H_LC_W109Y- | artificial | RIRSKYNNYATYYADSVKG |
| | HCDR2 | | |
| 1462 | G4H_LC_W109Y- | artificial | HGNFGNSYLSYFAY |
| | HCDR3 | | |
| 1463 | G4H_LC_W109Y- | artificial | GSSTGAVTSGYYPN |
| | LCDR1 | | |
| 1464 | G4H_LC_W109Y- | artificial | GTKFLAP |
| | LCDR2 | | |
| 1465 | G4H_LC_W109Y- | artificial | ALYYSNRWV |
| | LCDR3 | | |
| 1466 | G4H_LC_W109Y- | artificial | EVQLVESGGGLVQPGGSLKLSCAASGFTFNRYAMNWVRQAPGKGLEWVARIRSKYNNY |
| | VH | | ATYYADSVKGRFTISRDDSKNTAYLQMNNLKTEDTAVYYCVRHGNFGNSYLSYFAYWG |
| | | | QGTLVTVSS |
| 1467 | G4H_LC_W109Y- | artificial | QTVVTQEPSLTVSPGGTVTLTCGSSTGAVTSGYYPNWVQQKPGQAPRGLIGGTKFLAP |
| | VL | | GTPARFSGSLLGGKAALTLSGVQPEDEAEYYCALYYSNRWVFGGGTKLTVL |
| 1468 | H1E-HCDR1 | artificial | SYAMN |
| 1469 | H1E-HCDR2 | artificial | RIRSKYNNYATYYADSVKG |
| 1470 | H1E-HCDR3 | artificial | HGNFGNSYLSFWAY |
| 1471 | H1E-LCDR1 | artificial | GSSTGAVTSGYYPN |
| 1472 | H1E-LCDR2 | artificial | GTKFLAP |
| 1473 | H1E-LCDR3 | artificial | ALWYSNRWV |
| 1474 | H1E-VH | artificial | EVQLVESGGGLEQPGGSLKLSCAASGFTFNSYAMNWVRQAPGKGLEWVARIRSKYNNY |
| | | | ATYYADSVKGRFTISRDDSKNTAYLQMNNLKTEDTAVYYCVRHGNFGNSYLSFWAYWG |
| | | | QGTLVTVSS |
| 1475 | H1E-VL | artificial | QTVVTQEPSLTVSPGGTVTLTCGSSTGAVTSGYYPNWVQQKPGQAPRGLIGGTKFLAP |
| | | | GTPARFSGSLLGGKAALTLSGVQPEDEAEYYCALWYSNRWVFGGGTKLTVL |
| 1476 | H1E_HC_A89I | artificial | EVQLVESGGGLEQPGGSLKLSCAASGFTFNSYAMNWVRQAPGKGLEWVARIRSKYNNY |
| | -VH | | ATYYADSVKGRFTISRDDSKNTIYLQMNNLKTEDTAVYYCVRHGNFGNSYLSFWAYWG |
| | | | QGTLVTVSS |
| 1477 | H1E_HC_A89I | artificial | QTVVTQEPSLTVSPGGTVTLTCGSSTGAVTSGYYPNWVQQKPGQAPRGLIGGTKFLAP |
| | -VL | | GTPARFSGSLLGGKAALTLSGVQPEDEAEYYCALWYSNRWVFGGGTKLTVL |
| 1478 | H1E_HC_A89L | artificial | EVQLVESGGGLEQPGGSLKLSCAASGFTFNSYAMNWVRQAPGKGLEWVARIRSKYNNY |
| | -VH | | ATYYADSVKGRFTISRDDSKNTLYLQMNNLKTEDTAVYYCVRHGNFGNSYLSFWAYWG |
| | | | QGTLVTVSS |
| 1479 | H1E_HC_A89L | artificial | QTVVTQEPSLTVSPGGTVTLTCGSSTGAVTSGYYPNWVQQKPGQAPRGLIGGTKFLAP |
| | -VL | | GTPARFSGSLLGGKAALTLSGVQPEDEAEYYCALWYSNRWVFGGGTKLTVL |
| 1480 | H1E_HC_A89T | artificial | EVQLVESGGGLEQPGGSLKLSCAASGFTENSYAMNWVRQAPGKGLEWVARIRSKYNNY |
| | -VH | | ATYYADSVKGRFTISRDDSKNTTYLQMNNLKTEDTAVYYCVRHGNFGNSYLSFWAYWG |
| | | | QGTLVTVSS |
| 1481 | H1E_HC_A89T | artificial | QTVVTQEPSLTVSPGGTVTLTCGSSTGAVTSGYYPNWVQQKPGQAPRGLIGGTKFLAP |
| | -VL | | GTPARFSGSLLGGKAALTLSGVQPEDEAEYYCALWYSNRWVFGGGTKLTVL |
| 1482 | H1E_HC_A89V | artificial | EVQLVESGGGLEQPGGSLKLSCAASGFTENSYAMNWVRQAPGKGLEWVARIRSKYNNY |
| | -VH | | ATYYADSVKGRFTISRDDSKNTVYLQMNNLKTEDTAVYYCVRHGNFGNSYLSFWAYWG |
| | | | QGTLVTVSS |
| 1483 | H1E_HC_A89V | artificial | QTVVTQEPSLTVSPGGTVTLTCGSSTGAVTSGYYPNWVQQKPGQAPRGLIGGTKFLAP |
| | -VL | | GTPARFSGSLLGGKAALTLSGVQPEDEAEYYCALWYSNRWVFGGGTKLTVL |
| 1484 | H1E_HC_L52M | artificial | EVQLVESGGGLEQPGGSLKLSCAASGFTFNSYAMNWVRQAPGKGMEWVARIRSKYNNY |
| | -VH | | ATYYADSVKGRFTISRDDSKNTAYLQMNNLKTEDTAVYYCVRHGNFGNSYLSFWAYWG |
| | | | QGTLVTVSS |
| 1485 | H1E_HC_L52M | artificial | QTVVTQEPSLTVSPGGTVTLTCGSSTGAVTSGYYPNWVQQKPGQAPRGLIGGTKFLAP |
| | -VL | | GTPARFSGSLLGGKAALTLSGVQPEDEAEYYCALWYSNRWVFGGGTKLTVL |
| 1486 | H1E_HC_L52M_ | artificial | EVQLVESGGGLEQPGGSLKLSCAASGFTFNSYAMNWVRQAPGKGMEWVARIRSKYNNY |
| | LC_L21I_ | | ATYYADSVKGRFTISRDDSKNTAYLQMNNLKTEDTAVYYCVRHGNFGNSYLSFWAYWG |
| | Q46K_G141S- | | QGTLVTVSS |
| | VH | | |
| 1487 | H1E_HC_L52M_ | artificial | QTVVTQEPSLTVSPGGTVTITCGSSTGAVTSGYYPNWVQKKPGQAPRGLIGGTKFLAP |
| | LC_L21I_ | | GTPARFSGSLLGGKAALTLSGVQPEDEAEYYCALWYSNRWVFGSGTKLTVL |
| | Q46K_G141S- | | |
| | VL | | |
| 1488 | H1E_HC_L52M_ | artificial | EVQLVESGGGLEQPGGSLKLSCAASGFTFNSYAMNWVRQAPGKGMEWVARIRSKYNNY |
| | LC_Q46K- | | ATYYADSVKGRFTISRDDSKNTAYLQMNNLKTEDTAVYYCVRHGNFGNSYLSFWAYWG |
| | VH | | QGTLVTVSS |
| 1489 | H1E_HC_L52M_ | artificial | QTVVTQEPSLTVSPGGTVTLTCGSSTGAVTSGYYPNWVQKKPGQAPRGLIGGTKFLAP |
| | LC_Q46K- | | GTPARFSGSLLGGKAALTLSGVQPEDEAEYYCALWYSNRWVFGGGTKLTVL |
| | VL | | |
| 1490 | H1E_HC_L52M_ | artificial | EVQLVESGGGLEQPGGSLKLSCAASGFTENSYAMNWVRQAPGKGMEWVARIRSKYNNY |
| | LC_Q46K_ | | ATYYADSVKGRFTISRDDSKNTAYLQMNNLKTEDTAVYYCVRHGNFGNSYLSFWAYWG |
| | G141S-VH | | QGTLVTVSS |
| 1491 | H1E_HC_L52M_ | artificial | QTVVTQEPSLTVSPGGTVTLTCGSSTGAVTSGYYPNWVQKKPGQAPRGLIGGTKFLAP |
| | LC_Q46K_ | | GTPARFSGSLLGGKAALTLSGVQPEDEAEYYCALWYSNRWVFGSGTKLTVL |
| | G141S-VL | | |
| 1492 | H1E_HC_L52V | artificial | EVQLVESGGGLEQPGGSLKLSCAASGFTFNSYAMNWVRQAPGKGVEWVARIRSKYNNY |
| | -VH | | ATYYADSVKGRFTISRDDSKNTAYLQMNNLKTEDTAVYYCVRHGNFGNSYLSFWAYWG |
| | | | QGTLVTVSS |
| 1493 | H1E_HC_L52V | artificial | QTVVTQEPSLTVSPGGTVTLTCGSSTGAVTSGYYPNWVQQKPGQAPRGLIGGTKFLAP |
| | -VL | | GTPARFSGSLLGGKAALTLSGVQPEDEAEYYCALWYSNRWVFGGGTKLTVL |
| 1494 | H1E_HC_L52V_ | artificial | EVQLVESGGGLEQPGGSLKLSCAASGFTFNSYAMNWVRQAPGKGVEWVARIRSKYNNY |
| | LC_V44F- | | ATYYADSVKGRFTISRDDSKNTAYLQMNNLKTEDTAVYYCVRHGNFGNSYLSFWAYWG |
| | VH | | QGTLVTVSS |
| 1495 | H1E_HC_L52V_ | artificial | QTVVTQEPSLTVSPGGTVTLTCGSSTGAVTSGYYPNWFQQKPGQAPRGLIGGTKFLAP |
| | LC_V44F- | | GTPARFSGSLLGGKAALTLSGVQPEDEAEYYCALWYSNRWVFGGGTKLTVL |
| | VL | | |
| 1496 | H1E_HC_L52V_ | artificial | EVQLVESGGGLEQPGGSLKLSCAASGFTENSYAMNWVRQAPGKGVEWVARIRSKYNNY |
| | LC_V44Y- | | ATYYADSVKGRFTISRDDSKNTAYLQMNNLKTEDTAVYYCVRHGNFGNSYLSFWAYWG |
| | VH | | QGTLVTVSS |
| 1497 | H1E_HC_L52V_ | artificial | QTVVTQEPSLTVSPGGTVTLTCGSSTGAVTSGYYPNWYQQKPGQAPRGLIGGTKFLAP |
| | LC_V44Y- | | GTPARFSGSLLGGKAALTLSGVQPEDEAEYYCALWYSNRWVFGGGTKLTVL |
| | VL | | |
| 1498 | H1E_HC_M41F_ | artificial | SYAFN |
| | A89V- | | |
| | HCDR1 | | |
| 1499 | H1E_HC_M41F_ | artificial | RIRSKYNNYATYYADSVKG |
| | A89V- | | |
| | HCDR2 | | |
| 1500 | H1E_HC_M41F_ | artificial | HGNFGNSYLSFWAY |
| | A89V- | | |
| | HCDR3 | | |
| 1501 | H1E_HC_M41F_ | artificial | GSSTGAVTSGYYPN |
| | A89V- | | |
| | LCDR1 | | |
| 1502 | H1E_HC_M41F_ | artificial | GTKFLAP |
| | A89V-LCDR2 | | |
| 1503 | H1E_HC_M41F_ | artificial | ALWYSNRWV |
| | A89V- | | |
| | LCDR3 | | |
| 1504 | H1E_HC_M41F_ | artificial | EVQLVESGGGLEQPGGSLKLSCAASGFTFNSYAFNWVRQAPGKGLEWVARIRSKYNNY |
| | A89V-VH | | ATYYADSVKGRFTISRDDSKNTVYLQMNNLKTEDTAVYYCVRHGNFGNSYLSFWAYWG |
| | | | QGTLVTVSS |
| 1505 | H1E_HC_M41F | artificial | QTVVTQEPSLTVSPGGTVTLTCGSSTGAVTSGYYPNWVQQKPGQAPRGLIGGTKFLAP |
| | A89V-VL | | GTPARFSGSLLGGKAALTLSGVQPEDEAEYYCALWYSNRWVFGGGTKLTVL |
| 1506 | H1E_HC_M41I | artificial | SYAIN |
| | -HCDR1 | | |
| 1507 | H1E_HC_M41I | artificial | RIRSKYNNYATYYADSVKG |
| | -HCDR2 | | |
| 1508 | H1E_HC_M41I | artificial | HGNFGNSYLSFWAY |
| | -HCDR3 | | |
| 1509 | H1E_HC_M41I | artificial | GSSTGAVTSGYYPN |
| | -LCDR1 | | |
| 1510 | H1E_HC_M41I | artificial | GTKFLAP |
| | -LCDR2 | | |
| 1511 | H1E_HC_M41I | artificial | ALWYSNRWV |
| | -LCDR3 | | |
| 1512 | H1E_HC_M41I | artificial | EVQLVESGGGLEQPGGSLKLSCAASGFTENSYAINWVRQAPGKGLEWVARIRSKYNNY |
| | -VH | | ATYYADSVKGRFTISRDDSKNTAYLQMNNLKTEDTAVYYCVRHGNFGNSYLSFWAYWG |
| | | | QGTLVTVSS |
| 1513 | H1E_HC_M41I | artificial | QTVVTQEPSLTVSPGGTVTLTCGSSTGAVTSGYYPNWVQQKPGQAPRGLIGGTKFLAP |
| | -VL | | GTPARFSGSLLGGKAALTLSGVQPEDEAEYYCALWYSNRWVFGGGTKLTVL |
| 1514 | H1E_HC_M41I_ | artificial | EVQLVESGGGLEQPGGSLKLSCAASGFTENSYAINWVRQAPGKGLEWVARIRSKYNNY |
| | A89L-VH | | ATYYADSVKGRFTISRDDSKNTLYLQMNNLKTEDTAVYYCVRHGNFGNSYLSFWAYWG |
| | | | QGTLVTVSS |
| 1515 | H1E_HC_M41I_ | artificial | QTVVTQEPSLTVSPGGTVTLTCGSSTGAVTSGYYPNWVQQKPGQAPRGLIGGTKFLAP |
| | A89L-VL | | GTPARFSGSLLGGKAALTLSGVQPEDEAEYYCALWYSNRWVFGGGTKLTVL |
| 1516 | H1E_HC_M41I_ | artificial | EVQLVESGGGLEQPGGSLKLSCAASGFTFNSYAINWVRQAPGKGLEWVARIRSKYNNY |
| | A89V-VH | | ATYYADSVKGRFTISRDDSKNTVYLQMNNLKTEDTAVYYCVRHGNFGNSYLSFWAYWG |
| | | | QGTLVTVSS |
| 1517 | H1E_HC_M41I_ | artificial | QTVVTQEPSLTVSPGGTVTLTCGSSTGAVTSGYYPNWVQQKPGQAPRGLIGGTKFLAP |
| | A89V-VL | | GTPARFSGSLLGGKAALTLSGVQPEDEAEYYCALWYSNRWVFGGGTKLTVL |
| 1518 | H1E_HC_M41I_ | artificial | EVQLVESGGGLEQPGGSLKLSCAASGFTENSYAINWVRQAPGKGLEWVARIRSKYNNY |
| | A89V_LC_ | | ATYYADSVKGRFTISRDDSKNTVYLQMNNLKTEDTAVYYCVRHGNFGNSYLSFWAYWG |
| | L21I_Q46K_ | | QGTLVTVSS |
| | G141S-VH | | |
| 1519 | H1E_HC_M41I_ | artificial | QTVVTQEPSLTVSPGGTVTITCGSSTGAVTSGYYPNWVQKKPGQAPRGLIGGTKFLAP |
| | A89V_LC_ | | GTPARFSGSLLGGKAALTLSGVQPEDEAEYYCALWYSNRWVFGSGTKLTVL |
| | L21I_Q46K_ | | |
| | G141S-VL | | |
| 1520 | H1E_HC_M41I_ | artificial | EVQLVESGGGLEQPGGSLKLSCAASGFTENSYAINWVRQAPGKGLEWVARIRSKYNNY |
| | A89V_LC_ | | ATYYADSVKGRFTISRDDSKNTVYLQMNNLKTEDTAVYYCVRHGNFGNSYLSFWAYWG |
| | Q46K-VH | | QGTLVTVSS |
| 1521 | H1E_HC_M41I_ | artificial | QTVVTQEPSLTVSPGGTVTLTCGSSTGAVTSGYYPNWVQKKPGQAPRGLIGGTKFLAP |
| | A89V_LC_ | | GTPARFSGSLLGGKAALTLSGVQPEDEAEYYCALWYSNRWVFGGGTKLTVL |
| | Q46K-VL | | |
| 1522 | H1E_HC_M41I_ | artificial | EVQLVESGGGLEQPGGSLKLSCAASGFTFNSYAINWVRQAPGKGVEWVARIRSKYNNY |
| | L52V_A89V_ | | ATYYADSVKGRFTISRDDSKNTVYLQMNNLKTEDTAVYYCVRHGNFGNSYLSFWAYWG |
| | LC_L21I_ | | QGTLVTVSS |
| | Q46K_G141S_ | | |
| | FV44-VH | | |
| 1523 | H1E_HC_M41I_ | artificial | QTVVTQEPSLTVSPGGTVTITCGSSTGAVTSGYYPNWFQKKPGQAPRGLIGGTKFLAP |
| | L52V_A89V_ | | GTPARFSGSLLGGKAALTLSGVQPEDEAEYYCALWYSNRWVFGSGTKLTVL |
| | LC_L21I_ | | |
| | Q46K_G141S_ | | |
| | V44F-VL | | |
| 1524 | H1E_HC_M41I_ | artificial | EVQLVESGGGLEQPGGSLKLSCAASGFTENSYAINWVRQAPGKGLEWVARIRSKYNNY |
| | LC_L21I_ | | ATYYADSVKGRFTISRDDSKNTAYLQMNNLKTEDTAVYYCVRHGNFGNSYLSFWAYWG |
| | Q46K_G141S- | | QGTLVTVSS |
| | VH | | |
| 1525 | H1E_HC_M41I_ | artificial | QTVVTQEPSLTVSPGGTVTITCGSSTGAVTSGYYPNWVQKKPGQAPRGLIGGTKFLAP |
| | LC_L21I_ | | GTPARFSGSLLGGKAALTLSGVQPEDEAEYYCALWYSNRWVFGSGTKLTVL |
| | Q46K_G141S- | | |
| | VL | | |
| 1526 | H1E_HC_M41I_ | artificial | EVQLVESGGGLEQPGGSLKLSCAASGFTFNSYAINWVREAPGKGLEWVARIRSKYNNY |
| | Q46E_A89V_ | | ATYYADSVKGRFTISRDDSKNTVYLQMNNLKTEDTAVYYCVRHGNFGNSYLSFWAYWG |
| | LC_L21I_ | | QGTLVTVSS |
| | Q46K_G141S- | | |
| | VH | | |
| 1527 | H1E_HC_M41I_ | artificial | QTVVTQEPSLTVSPGGTVTITCGSSTGAVTSGYYPNWVQKKPGQAPRGLIGGTKFLAP |
| | Q46E_A89V_ | | GTPARFSGSLLGGKAALTLSGVQPEDEAEYYCALWYSNRWVFGSGTKLTVL |
| | LC_L21I_ | | |
| | Q46K_G141S- | | |
| | VL | | |
| 1528 | H1E_HC_M41V | artificial | SYAVN |
| | -HCDR1 | | |
| 1529 | H1E_HC_M41V | artificial | RIRSKYNNYATYYADSVKG |
| | -HCDR2 | | |
| 1530 | H1E_HC_M41V | artificial | HGNFGNSYLSFWAY |
| | -HCDR3 | | |
| 1531 | H1E_HC_M41V | artificial | GSSTGAVTSGYYPN |
| | -LCDR1 | | |
| 1532 | H1E_HC_M41V | artificial | GTKFLAP |
| | -LCDR2 | | |
| 1533 | H1E_HC_M41V | artificial | ALWYSNRWV |
| | -LCDR3 | | |
| 1534 | H1E_HC_M41V | artificial | EVQLVESGGGLEQPGGSLKLSCAASGFTFNSYAVNWVRQAPGKGLEWVARIRSKYNNY |
| | -VH | | ATYYADSVKGRFTISRDDSKNTAYLQMNNLKTEDTAVYYCVRHGNFGNSYLSFWAYWG |
| | | | QGTLVTVSS |
| 1535 | H1E_HC_M41V | artificial | QTVVTQEPSLTVSPGGTVTLTCGSSTGAVTSGYYPNWVQQKPGQAPRGLIGGTKFLAP |
| | -VL | | GTPARFSGSLLGGKAALTLSGVQPEDEAEYYCALWYSNRWVFGGGTKLTVL |
| 1536 | H1E_HC_Q46D | artificial | EVQLVESGGGLEQPGGSLKLSCAASGFTENSYAMNWVRDAPGKGLEWVARIRSKYNNY |
| | -VH | | ATYYADSVKGRFTISRDDSKNTAYLQMNNLKTEDTAVYYCVRHGNFGNSYLSFWAYWG |
| | | | QGTLVTVSS |
| 1537 | H1E_HC_Q46D | artificial | QTVVTQEPSLTVSPGGTVTLTCGSSTGAVTSGYYPNWVQQKPGQAPRGLIGGTKFLAP |
| | -VL | | GTPARFSGSLLGGKAALTLSGVQPEDEAEYYCALWYSNRWVFGGGTKLTVL |
| 1538 | H1E_HC_Q46D_ | artificial | EVQLVESGGGLEQPGGSLKLSCAASGFTFNSYAMNWVRDAPGKGLEWVARIRSKYNNY |
| | LC_L21I_ | | ATYYADSVKGRFTISRDDSKNTAYLQMNNLKTEDTAVYYCVRHGNFGNSYLSFWAYWG |
| | Q46K_G141S- | | QGTLVTVSS |
| | VH | | |
| 1539 | H1E_HC_Q46D_ | artificial | QTVVTQEPSLTVSPGGTVTITCGSSTGAVTSGYYPNWVQKKPGQAPRGLIGGTKFLAP |
| | LC_L21I_ | | GTPARFSGSLLGGKAALTLSGVQPEDEAEYYCALWYSNRWVFGSGTKLTVL |
| | Q46K_G141S- | | |
| | VL | | |
| 1540 | H1E_HC_Q46D_ | artificial | EVQLVESGGGLEQPGGSLKLSCAASGFTFNSYAMNWVRDAPGKGLEWVARIRSKYNNY |
| | LC_L21I_ | | ATYYADSVKGRFTISRDDSKNTAYLQMNNLKTEDTAVYYCVRHGNFGNSYLSFWAYWG |
| | Q46R_G141S- | | QGTLVTVSS |
| | VH | | |
| 1541 | H1E_HC_Q46D_ | artificial | QTVVTQEPSLTVSPGGTVTITCGSSTGAVTSGYYPNWVQRKPGQAPRGLIGGTKFLAP |
| | LC_L21I_ | | GTPARFSGSLLGGKAALTLSGVQPEDEAEYYCALWYSNRWVFGSGTKLTVL |
| | Q46R_G141S- | | |
| | VL | | |
| 1542 | H1E_HC_Q46D_ | artificial | EVQLVESGGGLEQPGGSLKLSCAASGFTFNSYAMNWVRDAPGKGLEWVARIRSKYNNY |
| | LC_Q46K- | | ATYYADSVKGRFTISRDDSKNTAYLQMNNLKTEDTAVYYCVRHGNFGNSYLSFWAYWG |
| | VH | | QGTLVTVSS |
| 1543 | H1E_HC_Q46D_ | artificial | QTVVTQEPSLTVSPGGTVTLTCGSSTGAVTSGYYPNWVQKKPGQAPRGLIGGTKFLAP |
| | LC_Q46K- | | GTPARFSGSLLGGKAALTLSGVQPEDEAEYYCALWYSNRWVFGGGTKLTVL |
| | VL | | |
| 1544 | H1E_HC_Q46D_ | artificial | EVQLVESGGGLEQPGGSLKLSCAASGFTENSYAMNWVRDAPGKGLEWVARIRSKYNNY |
| | LC_Q46K_ | | ATYYADSVKGRFTISRDDSKNTAYLQMNNLKTEDTAVYYCVRHGNFGNSYLSFWAYWG |
| | G141S-VH | | QGTLVTVSS |
| 1545 | H1E_HC_Q46D_ | artificial | QTVVTQEPSLTVSPGGTVTLTCGSSTGAVTSGYYPNWVQKKPGQAPRGLIGGTKFLAP |
| | LC_Q46K_ | | GTPARFSGSLLGGKAALTLSGVQPEDEAEYYCALWYSNRWVFGSGTKLTVL |
| | G141S-VL | | |
| 1546 | H1E_HC_Q46D_ | artificial | EVQLVESGGGLEQPGGSLKLSCAASGFTENSYAMNWVRDAPGKGLEWVARIRSKYNNY |
| | LC_Q46R- | | ATYYADSVKGRFTISRDDSKNTAYLQMNNLKTEDTAVYYCVRHGNFGNSYLSFWAYWG |
| | VH | | QGTLVTVSS |
| 1547 | H1E_HC_Q46D_ | artificial | QTVVTQEPSLTVSPGGTVTLTCGSSTGAVTSGYYPNWVQRKPGQAPRGLIGGTKFLAP |
| | LC_Q46R- | | GTPARFSGSLLGGKAALTLSGVQPEDEAEYYCALWYSNRWVFGGGTKLTVL |
| | VL | | |
| 1548 | H1E_HC_Q46D_ | artificial | EVQLVESGGGLEQPGGSLKLSCAASGFTENSYAMNWVRDAPGKGLEWVARIRSKYNNY |
| | LC_Q46R_ | | ATYYADSVKGRFTISRDDSKNTAYLQMNNLKTEDTAVYYCVRHGNFGNSYLSFWAYWG |
| | G141S-VH | | QGTLVTVSS |
| 1549 | H1E_HC_Q46D_ | artificial | QTVVTQEPSLTVSPGGTVTLTCGSSTGAVTSGYYPNWVQRKPGQAPRGLIGGTKFLAP |
| | LC_Q46R_ | | GTPARFSGSLLGGKAALTLSGVQPEDEAEYYCALWYSNRWVFGSGTKLTVL |
| | G141S-VL | | |
| 1550 | H1E_HC_Q46E | artificial | EVQLVESGGGLEQPGGSLKLSCAASGFTFNSYAMNWVREAPGKGLEWVARIRSKYNNY |
| | -VH | | ATYYADSVKGRFTISRDDSKNTAYLQMNNLKTEDTAVYYCVRHGNFGNSYLSFWAYWG |
| | | | QGTLVTVSS |
| 1551 | H1E_HC_Q46E | artificial | QTVVTQEPSLTVSPGGTVTLTCGSSTGAVTSGYYPNWVQQKPGQAPRGLIGGTKFLAP |
| | -VL | | GTPARFSGSLLGGKAALTLSGVQPEDEAEYYCALWYSNRWVFGGGTKLTVL |
| 1552 | H1E_HC_Q46E_ | artificial | EVQLVESGGGLEQPGGSLKLSCAASGFTFNSYAMNWVREAPGKGLEWVARIRSKYNNY |
| | LC_L21I_ | | ATYYADSVKGRFTISRDDSKNTAYLQMNNLKTEDTAVYYCVRHGNFGNSYLSFWAYWG |
| | Q46K_G141S- | | QGTLVTVSS |
| | VH | | |
| 1553 | H1E_HC_Q46E_ | artificial | QTVVTQEPSLTVSPGGTVTITCGSSTGAVTSGYYPNWVQKKPGQAPRGLIGGTKFLAP |
| | LC_L21I_ | | GTPARFSGSLLGGKAALTLSGVQPEDEAEYYCALWYSNRWVFGSGTKLTVL |
| | Q46K_G141S- | | |
| | VL | | |
| 1554 | H1E_HC_Q46E_ | artificial | EVQLVESGGGLEQPGGSLKLSCAASGFTFNSYAMNWVREAPGKGLEWVARIRSKYNNY |
| | LC_L21I_ | | ATYYADSVKGRFTISRDDSKNTAYLQMNNLKTEDTAVYYCVRHGNFGNSYLSFWAYWG |
| | Q46R_G141S- | | QGTLVTVSS |
| | VH | | |
| 1555 | H1E_HC_Q46E_ | artificial | QTVVTQEPSLTVSPGGTVTITCGSSTGAVTSGYYPNWVQRKPGQAPRGLIGGTKFLAP |
| | LC_L21I_ | | GTPARFSGSLLGGKAALTLSGVQPEDEAEYYCALWYSNRWVFGSGTKLTVL |
| | Q46R_G141S- | | |
| | VL | | |
| 1556 | H1E_HC_Q46E_ | artificial | EVQLVESGGGLEQPGGSLKLSCAASGFTFNSYAMNWVREAPGKGLEWVARIRSKYNNY |
| | LC_Q46K- | | ATYYADSVKGRFTISRDDSKNTAYLQMNNLKTEDTAVYYCVRHGNFGNSYLSFWAYWG |
| | VH | | QGTLVTVSS |
| 1557 | H1E_HC_Q46E_ | artificial | QTVVTQEPSLTVSPGGTVTLTCGSSTGAVTSGYYPNWVQKKPGQAPRGLIGGTKFLAP |
| | LC_Q46K- | | GTPARFSGSLLGGKAALTLSGVQPEDEAEYYCALWYSNRWVFGGGTKLTVL |
| | VL | | |
| 1558 | H1E_HC_Q46E_ | artificial | EVQLVESGGGLEQPGGSLKLSCAASGFTENSYAMNWVREAPGKGLEWVARIRSKYNNY |
| | LC_Q46K_ | | ATYYADSVKGRFTISRDDSKNTAYLQMNNLKTEDTAVYYCVRHGNFGNSYLSFWAYWG |
| | G141S-VH | | QGTLVTVSS |
| 1559 | H1E_HC_Q46E_ | artificial | QTVVTQEPSLTVSPGGTVTLTCGSSTGAVTSGYYPNWVQKKPGQAPRGLIGGTKFLAP |
| | LC_Q46K_ | | GTPARFSGSLLGGKAALTLSGVQPEDEAEYYCALWYSNRWVFGSGTKLTVL |
| | G141S-VL | | |
| 1560 | H1E_HC_Q46E_ | artificial | EVQLVESGGGLEQPGGSLKLSCAASGFTFNSYAMNWVREAPGKGLEWVARIRSKYNNY |
| | LC_Q46R- | | ATYYADSVKGRFTISRDDSKNTAYLQMNNLKTEDTAVYYCVRHGNFGNSYLSFWAYWG |
| | VH | | QGTLVTVSS |
| 1561 | H1E_HC_Q46E_ | artificial | QTVVTQEPSLTVSPGGTVTLTCGSSTGAVTSGYYPNWVQRKPGQAPRGLIGGTKFLAP |
| | LC_Q46R- | | GTPARFSGSLLGGKAALTLSGVQPEDEAEYYCALWYSNRWVFGGGTKLTVL |
| | VL | | |
| 1562 | H1E_HC_Q46E_ | artificial | EVQLVESGGGLEQPGGSLKLSCAASGFTFNSYAMNWVREAPGKGLEWVARIRSKYNNY |
| | LC_Q46R_ | | ATYYADSVKGRFTISRDDSKNTAYLQMNNLKTEDTAVYYCVRHGNFGNSYLSFWAYWG |
| | G141S-VH | | QGTLVTVSS |
| 1563 | H1E_HC_Q46E_ | artificial | QTVVTQEPSLTVSPGGTVTLTCGSSTGAVTSGYYPNWVQRKPGQAPRGLIGGTKFLAP |
| | LC_Q46R_ | | GTPARFSGSLLGGKAALTLSGVQPEDEAEYYCALWYSNRWVFGSGTKLTVL |
| | G141S-VL | | |
| 1564 | H1E_HC_Q46K | artificial | EVQLVESGGGLEQPGGSLKLSCAASGFTENSYAMNWVRKAPGKGLEWVARIRSKYNNY |
| | -VH | | ATYYADSVKGRFTISRDDSKNTAYLQMNNLKTEDTAVYYCVRHGNFGNSYLSFWAYWG |
| | | | QGTLVTVSS |
| 1565 | H1E_HC_Q46K | artificial | QTVVTQEPSLTVSPGGTVTLTCGSSTGAVTSGYYPNWVQQKPGQAPRGLIGGTKFLAP |
| | -VL | | GTPARFSGSLLGGKAALTLSGVQPEDEAEYYCALWYSNRWVFGGGTKLTVL |
| 1566 | H1E_HC_Q46R | artificial | EVQLVESGGGLEQPGGSLKLSCAASGFTFNSYAMNWVRRAPGKGLEWVARIRSKYNNY |
| | -VH | | ATYYADSVKGRFTISRDDSKNTAYLQMNNLKTEDTAVYYCVRHGNFGNSYLSFWAYWG |
| | | | QGTLVTVSS |
| 1567 | H1E_HC_Q46R | artificial | QTVVTQEPSLTVSPGGTVTLTCGSSTGAVTSGYYPNWVQQKPGQAPRGLIGGTKFLAP |
| | -VL | | GTPARFSGSLLGGKAALTLSGVQPEDEAEYYCALWYSNRWVFGGGTKLTVL |
| 1568 | H1E_HC_V107A- | artificial | EVQLVESGGGLEQPGGSLKLSCAASGFTFNSYAMNWVRQAPGKGLEWVARIRSKYNNY |
| | VH | | ATYYADSVKGRFTISRDDSKNTAYLQMNNLKTEDTAVYYCARHGNFGNSYLSFWAYWG |
| | | | QGTLVTVSS |
| 1569 | H1E_HC_V107A- | artificial | QTVVTQEPSLTVSPGGTVTLTCGSSTGAVTSGYYPNWVQQKPGQAPRGLIGGTKFLAP |
| | VL | | GTPARFSGSLLGGKAALTLSGVQPEDEAEYYCALWYSNRWVFGGGTKLTVL |
| 1570 | H1E_HC_V107L- | artificial | EVQLVESGGGLEQPGGSLKLSCAASGFTFNSYAMNWVRQAPGKGLEWVARIRSKYNNY |
| | VH | | ATYYADSVKGRFTISRDDSKNTAYLQMNNLKTEDTAVYYCLRHGNFGNSYLSFWAYWG |
| | | | QGTLVTVSS |
| 1571 | H1E_HC_V107L- | artificial | QTVVTQEPSLTVSPGGTVTLTCGSSTGAVTSGYYPNWVQQKPGQAPRGLIGGTKFLAP |
| | VL | | GTPARFSGSLLGGKAALTLSGVQPEDEAEYYCALWYSNRWVFGGGTKLTVL |
| 1572 | H1E_HC_W136F- | artificial | SYAMN |
| | HCDR1 | | |
| 1573 | H1E_HC_W136F- | artificial | RIRSKYNNYATYYADSVKG |
| | HCDR2 | | |
| 1574 | H1E_HC_W136F- | artificial | HGNFGNSYLSFFAY |
| | HCDR3 | | |
| 1575 | H1E_HC_W136F- | artificial | GSSTGAVTSGYYPN |
| | LCDR1 | | |
| 1576 | H1E_HC_W136F- | artificial | GTKFLAP |
| | LCDR2 | | |
| 1577 | H1E_HC_W136F- | artificial | ALWYSNRWV |
| | LCDR3 | | |
| 1578 | H1E_HC_W136F- | artificial | EVQLVESGGGLEQPGGSLKLSCAASGFTFNSYAMNWVRQAPGKGLEWVARIRSKYNNY |
| | VH | | ATYYADSVKGRFTISRDDSKNTAYLQMNNLKTEDTAVYYCVRHGNFGNSYLSFFAYWG |
| | | | QGTLVTVSS |
| 1579 | H1E_HC_W136F- | artificial | QTVVTQEPSLTVSPGGTVTLTCGSSTGAVTSGYYPNWVQQKPGQAPRGLIGGTKFLAP |
| | VL | | GTPARFSGSLLGGKAALTLSGVQPEDEAEYYCALWYSNRWVFGGGTKLTVL |
| 1580 | H1E_HC_W136F_ | artificial | EVQLVESGGGLEQPGGSLKLSCAASGFTFNSYAMNWVRQAPGKGLEWVARIRSKYNNY |
| | LC_V44I- | | ATYYADSVKGRFTISRDDSKNTAYLQMNNLKTEDTAVYYCVRHGNFGNSYLSFFAYWG |
| | VH | | QGTLVTVSS |
| 1581 | H1E_HC_W136F_ | artificial | QTVVTQEPSLTVSPGGTVTLTCGSSTGAVTSGYYPNWIQQKPGQAPRGLIGGTKFLAP |
| | LC_V44I- | | GTPARFSGSLLGGKAALTLSGVQPEDEAEYYCALWYSNRWVFGGGTKLTVL |
| | VL | | |
| 1582 | H1E_HC_W136F_ | artificial | EVQLVESGGGLEQPGGSLKLSCAASGFTFNSYAMNWVRQAPGKGLEWVARIRSKYNNY |
| | LC_V44L- | | ATYYADSVKGRFTISRDDSKNTAYLQMNNLKTEDTAVYYCVRHGNFGNSYLSFFAYWG |
| | VH | | QGTLVTVSS |
| 1583 | H1E_HC_W136F_ | artificial | QTVVTQEPSLTVSPGGTVTLTCGSSTGAVTSGYYPNWLQQKPGQAPRGLIGGTKFLAP |
| | LC_V44L- | | GTPARFSGSLLGGKAALTLSGVQPEDEAEYYCALWYSNRWVFGGGTKLTVL |
| | VL | | |
| 1584 | H1E_I2E- | artificial | SYAIN |
| | HCDR1 | | |
| 1585 | H1E_I2E- | artificial | RIRSKYNNYATYYADAVKG |
| | HCDR2 | | |
| 1586 | H1E_I2E- | artificial | AGNFGSSYLSFWAY |
| | HCDR3 | | |
| 1587 | H1E_I2E- | artificial | GSSTGAVTSGYYPN |
| | LCDR1 | | |
| 1588 | H1E_I2E- | artificial | GTKFLAP |
| | LCDR2 | | |
| 1589 | H1E_I2E- | artificial | ALWYSNRWV |
| | LCDR3 | | |
| 1590 | H1E_I2E- | artificial | EVQLVESGGGLEQPGGSLKLSCAASGFTFNSYAINWVRQAPGKGLEWVARIRSKYNNY |
| | VH | | ATYYADAVKGRFTISRDDSKNTVYLQMNNLKTEDTAVYYCARAGNFGSSYLSFWAYWG |
| | | | QGTLVTVSS |
| 1591 | H1E_I2E- | artificial | QTVVTQEPSLTVSPGGTVTITCGSSTGAVTSGYYPNWVQKKPGQAPRGLIGGTKFLAP |
| | VL | | GTPARFSGSLSGGKAALTLSGVQPEDEAEYYCALWYSNRWVFGSGTKLTVL |
| 1592 | H1E_I2K- | artificial | SYAMN |
| | HCDR1 | | |
| 1593 | H1E_I2K- | artificial | RIRSKYNNYATYYAEAVKG |
| | HCDR2 | | |
| 1594 | H1E_I2K- | artificial | NENIGTSYLSFWAY |
| | HCDR3 | | |
| 1595 | H1E_I2K- | artificial | GSSTGAVTSGYYPN |
| | LCDR1 | | |
| 1596 | H1E_I2K- | artificial | GTKFLAP |
| | LCDR2 | | |
| 1597 | H1E_I2K- | artificial | ALWYSNRWV |
| | LCDR3 | | |
| 1598 | H1E_I2K- | artificial | EVQLVESGGGLEQPGGSLKLSCAASGFTFNSYAMNWVRQAPGKGLEWVARIRSKYNNY |
| | VH | | ATYYAEAVKGRFTISRDDSKNTVYLQMNNLKTEDTAVYYCVRNENIGTSYLSFWAYWG |
| | | | QGTLVTVSS |
| 1599 | H1E_I2K- | artificial | QTVVTQEPSLTVSPGGTVTITCGSSTGAVTSGYYPNWVQQKPGQAPRGLIGGTKFLAP |
| | VL | | GTPARFSGSLSGGKAALTLSGVQPEDEAEYYCALWYSNRWVFGSGTKLTVL |
| 1600 | H1E_I2L- | artificial | SYAMN |
| | HCDR1 | | |
| 1601 | H1E_I2L- | artificial | RIRSKYNNYATYYADAVKG |
| | HCDR2 | | |
| 1602 | H1E_I2L- | artificial | AGNFGSSYLSFFAY |
| | HCDR3 | | |
| 1603 | H1E_I2L- | artificial | GSSTGAVTSGYYPN |
| | LCDR1 | | |
| 1604 | H1E_I2L- | artificial | GTKFLAP |
| | LCDR2 | | |
| 1605 | H1E_I2L- | artificial | ALYYSNRWV |
| | LCDR3 | | |
| 1606 | H1E_I2L- | artificial | EVQLVESGGGLEQPGGSLKLSCAASGFTFNSYAMNWVRQAPGKGMEWVARIRSKYNNY |
| | VH | | ATYYADAVKGRFTISRDDSKNTLYLQMNNLKTEDTAVYYCVRAGNFGSSYLSFFAYWG |
| | | | QGTLVTVSS |
| 1607 | H1E_I2L- | artificial | QTVVTQEPSLTVSPGGTVTITCGSSTGAVTSGYYPNWIQKKPGQAPRGLIGGTKFLAP |
| | VL | | GTPARFSGSLEGGKAALTLSGVQPEDEAEYYCALYYSNRWVFGSGTKLTVL |
| 1608 | H1E_I2M- | artificial | SYAMN |
| | HCDR1 | | |
| 1609 | H1E_I2M- | artificial | RIRSKYNNYATYYADAVKG |
| | HCDR2 | | |
| 1610 | H1E_I2M- | artificial | AGNFGTSYLSFWAY |
| | HCDR3 | | |
| 1611 | H1E_I2M- | artificial | GSSTGAVTSGYYPN |
| | LCDR1 | | |
| 1612 | H1E_I2M- | artificial | GTKFLAP |
| | LCDR2 | | |
| 1613 | H1E_I2M- | artificial | ALWYSNRWV |
| | LCDR3 | | |
| 1614 | H1E_I2M- | artificial | EVQLVESGGGLEQPGGSLKLSCAASGFTFNSYAMNWVRQAPGKGMEWVARIRSKYNNY |
| | VH | | ATYYADAVKGRFTISRDDSKNTLYLQMNNLKTEDTAVYYCVRAGNFGTSYLSFWAYWG |
| | | | QGTLVTVSS |
| 1615 | H1E_I2M- | artificial | QTVVTQEPSLTVSPGGTVTITCGSSTGAVTSGYYPNWVQKKPGQAPRGLIGGTKFLAP |
| | VL | | GTPARFSGSLSGGKAALTLSGVQPEDEAEYYCALWYSNRWVFGSGTKLTVL |
| 1616 | H1E_I2M2- | artificial | SYAIN |
| | HCDR1 | | |
| 1617 | H1E_I2M2- | artificial | RIRSKYNNYATYYADAVKG |
| | HCDR2 | | |
| 1618 | H1E_I2M2- | artificial | NANFGTSYLSFFAY |
| | HCDR3 | | |
| 1619 | H1E_I2M2- | artificial | GSSTGAVTSGYYPN |
| | LCDR1 | | |
| 1620 | H1E_I2M2- | artificial | GTKFLAP |
| | LCDR2 | | |
| 1621 | H1E_I2M2- | artificial | ALWYSNRWV |
| | LCDR3 | | |
| 1622 | H1E_I2M2- | artificial | EVQLVESGGGLEQPGGSLKLSCAASGFTFNSYAINWVREAPGKGLEWVARIRSKYNNY |
| | VH | | ATYYADAVKGRFTISRDDSKNTAYLQMNNLKTEDTAVYYCVRNANFGTSYLSFFAYWG |
| | | | QGTLVTVSS |
| 1623 | H1E_I2M2- | artificial | QTVVTQEPSLTVSPGGTVTLTCGSSTGAVTSGYYPNWVQKKPGQAPRGLIGGTKFLAP |
| | VL | | GTPARFSGSLLGGKAALTLSGVQPEDEAEYYCALWYSNRWVFGSGTKLTVL |
| 1624 | H1E_LC_G141S- | artificial | EVQLVESGGGLEQPGGSLKLSCAASGFTFNSYAMNWVRQAPGKGLEWVARIRSKYNNY |
| | VH | | ATYYADSVKGRFTISRDDSKNTAYLQMNNLKTEDTAVYYCVRHGNFGNSYLSFWAYWG |
| | | | QGTLVTVSS |
| 1625 | H1E_LC_G141S- | artificial | QTVVTQEPSLTVSPGGTVTLTCGSSTGAVTSGYYPNWVQQKPGQAPRGLIGGTKFLAP |
| | VL | | GTPARFSGSLLGGKAALTLSGVQPEDEAEYYCALWYSNRWVFGSGTKLTVL |
| 1626 | H1E_LC_G141S_ | artificial | EVQLVESGGGLEQPGGSLKLSCAASGFTENSYAMNWVRQAPGKGLEWVARIRSKYNNY |
| | L21I-VH | | ATYYADSVKGRFTISRDDSKNTAYLQMNNLKTEDTAVYYCVRHGNFGNSYLSFWAYWG |
| | | | QGTLVTVSS |
| 1627 | H1E_LC_G141S_ | artificial | QTVVTQEPSLTVSPGGTVTITCGSSTGAVTSGYYPNWVQQKPGQAPRGLIGGTKFLAP |
| | L21I-VL | | GTPARFSGSLLGGKAALTLSGVQPEDEAEYYCALWYSNRWVFGSGTKLTVL |
| 1628 | H1E_LC_L83E | artificial | EVQLVESGGGLEQPGGSLKLSCAASGFTFNSYAMNWVRQAPGKGLEWVARIRSKYNNY |
| | -VH | | ATYYADSVKGRFTISRDDSKNTAYLQMNNLKTEDTAVYYCVRHGNFGNSYLSFWAYWG |
| | | | QGTLVTVSS |
| 1629 | H1E_LC_L83E | artificial | QTVVTQEPSLTVSPGGTVTLTCGSSTGAVTSGYYPNWVQQKPGQAPRGLIGGTKFLAP |
| | -VL | | GTPARFSGSLEGGKAALTLSGVQPEDEAEYYCALWYSNRWVFGGGTKLTVL |
| 1630 | H1E_LC_L83S | artificial | EVQLVESGGGLEQPGGSLKLSCAASGFTFNSYAMNWVRQAPGKGLEWVARIRSKYNNY |
| | -VH | | ATYYADSVKGRFTISRDDSKNTAYLQMNNLKTEDTAVYYCVRHGNFGNSYLSFWAYWG |
| | | | QGTLVTVSS |
| 1631 | H1E_LC_L83S | artificial | QTVVTQEPSLTVSPGGTVTLTCGSSTGAVTSGYYPNWVQQKPGQAPRGLIGGTKFLAP |
| | -VL | | GTPARFSGSLSGGKAALTLSGVQPEDEAEYYCALWYSNRWVFGGGTKLTVL |
| 1632 | H1E_LC_Q46E | artificial | EVQLVESGGGLEQPGGSLKLSCAASGFTFNSYAMNWVRQAPGKGLEWVARIRSKYNNY |
| | -VH | | ATYYADSVKGRFTISRDDSKNTAYLQMNNLKTEDTAVYYCVRHGNFGNSYLSFWAYWG |
| | | | QGTLVTVSS |
| 1633 | H1E_LC_Q46E | artificial | QTVVTQEPSLTVSPGGTVTLTCGSSTGAVTSGYYPNWVQEKPGQAPRGLIGGTKFLAP |
| | -VL | | GTPARFSGSLLGGKAALTLSGVQPEDEAEYYCALWYSNRWVFGGGTKLTVL |
| 1634 | H1E_LC_Q46K | artificial | EVQLVESGGGLEQPGGSLKLSCAASGFTFNSYAMNWVRQAPGKGLEWVARIRSKYNNY |
| | -VH | | ATYYADSVKGRFTISRDDSKNTAYLQMNNLKTEDTAVYYCVRHGNFGNSYLSFWAYWG |
| | | | QGTLVTVSS |
| 1635 | H1E_LC_Q46K | artificial | QTVVTQEPSLTVSPGGTVTLTCGSSTGAVTSGYYPNWVQKKPGQAPRGLIGGTKFLAP |
| | -VL | | GTPARFSGSLLGGKAALTLSGVQPEDEAEYYCALWYSNRWVFGGGTKLTVL |
| 1636 | H1E_LC_A107L- | artificial | SYAMN |
| | HCDR1 | | |
| 1637 | H1E_LC_A107L- | artificial | RIRSKYNNYATYYADSVKG |
| | HCDR2 | | |
| 1638 | H1E_LC_A107L- | artificial | HGNFGNSYLSFWAY |
| | HCDR3 | | |
| 1639 | H1E_LC_A107L- | artificial | GSSTGAVTSGYYPN |
| | LCDR1 | | |
| 1640 | H1E_LC_A107L- | artificial | GTKFLAP |
| | LCDR2 | | |
| 1641 | H1E_LC_A107L- | artificial | LLWYSNRWV |
| | LCDR3 | | |
| 1642 | H1E_LC_A107L- | artificial | EVQLVESGGGLEQPGGSLKLSCAASGFTFNSYAMNWVRQAPGKGLEWVARIRSKYNNY |
| | VH | | ATYYADSVKGRFTISRDDSKNTAYLQMNNLKTEDTAVYYCVRHGNFGNSYLSFWAYWG |
| | | | QGTLVTVSS |
| 1643 | H1E_LC_A107L- | artificial | QTVVTQEPSLTVSPGGTVTLTCGSSTGAVTSGYYPNWVQQKPGQAPRGLIGGTKFLAP |
| | VL | | GTPARFSGSLLGGKAALTLSGVQPEDEAEYYCLLWYSNRWVFGGGTKLTVL |
| 1644 | H1E_LC_V44I | artificial | EVQLVESGGGLEQPGGSLKLSCAASGFTFNSYAMNWVRQAPGKGLEWVARIRSKYNNY |
| | -VH | | ATYYADSVKGRFTISRDDSKNTAYLQMNNLKTEDTAVYYCVRHGNFGNSYLSFWAYWG |
| | | | QGTLVTVSS |
| 1645 | H1E_LC_V44I | artificial | QTVVTQEPSLTVSPGGTVTLTCGSSTGAVTSGYYPNWIQQKPGQAPRGLIGGTKFLAP |
| | -VL | | GTPARFSGSLLGGKAALTLSGVQPEDEAEYYCALWYSNRWVFGGGTKLTVL |
| 1646 | H1E_LC_V44L | artificial | EVQLVESGGGLEQPGGSLKLSCAASGFTFNSYAMNWVRQAPGKGLEWVARIRSKYNNY |
| | -VH | | ATYYADSVKGRFTISRDDSKNTAYLQMNNLKTEDTAVYYCVRHGNFGNSYLSFWAYWG |
| | | | QGTLVTVSS |
| 1647 | H1E_LC_V44L | artificial | QTVVTQEPSLTVSPGGTVTLTCGSSTGAVTSGYYPNWLQQKPGQAPRGLIGGTKFLAP |
| | -VL | | GTPARFSGSLLGGKAALTLSGVQPEDEAEYYCALWYSNRWVFGGGTKLTVL |
| 1648 | H1E_LC_V44M | artificial | EVQLVESGGGLEQPGGSLKLSCAASGFTFNSYAMNWVRQAPGKGLEWVARIRSKYNNY |
| | -VH | | ATYYADSVKGRFTISRDDSKNTAYLQMNNLKTEDTAVYYCVRHGNFGNSYLSFWAYWG |
| | | | QGTLVTVSS |
| 1649 | H1E_LC_V44M | artificial | QTVVTQEPSLTVSPGGTVTLTCGSSTGAVTSGYYPNWMQQKPGQAPRGLIGGTKFLAP |
| | -VL | | GTPARFSGSLLGGKAALTLSGVQPEDEAEYYCALWYSNRWVFGGGTKLTVL |
| 1650 | H1E_LC_W109Y- | artificial | SYAMN |
| | HCDR1 | | |
| 1651 | H1E_LC_W109Y- | artificial | RIRSKYNNYATYYADSVKG |
| | HCDR2 | | |
| 1652 | H1E_LC_W109Y- | artificial | HGNFGNSYLSFWAY |
| | HCDR3 | | |
| 1653 | H1E_LC_W109Y- | artificial | GSSTGAVTSGYYPN |
| | LCDR1 | | |
| 1654 | H1E_LC_W109Y- | artificial | GTKFLAP |
| | LCDR2 | | |
| 1655 | H1E_LC_W109Y- | artificial | ALYYSNRWV |
| | LCDR3 | | |
| 1656 | H1E_LC_W109Y- | artificial | EVQLVESGGGLEQPGGSLKLSCAASGFTFNSYAMNWVRQAPGKGLEWVARIRSKYNNY |
| | VH | | ATYYADSVKGRFTISRDDSKNTAYLQMNNLKTEDTAVYYCVRHGNFGNSYLSFWAYWG |
| | | | QGTLVTVSS |
| 1657 | H1E_LC_W109Y- | artificial | QTVVTQEPSLTVSPGGTVTLTCGSSTGAVTSGYYPNWVQQKPGQAPRGLIGGTKFLAP |
| | VL | | GTPARFSGSLLGGKAALTLSGVQPEDEAEYYCALYYSNRWVFGGGTKLTVL |
| 1658 | H2C-HCDR1 | artificial | KYAMN |
| 1659 | H2C-HCDR2 | artificial | RIRSKYNNYATYYADSVKD |
| 1660 | H2C-HCDR3 | artificial | HGNFGNSYISYWAY |
| 1661 | H2C-LCDR1 | artificial | GSSTGAVTSGYYPN |
| 1662 | H2C-LCDR2 | artificial | GTKFLAP |
| 1663 | H2C-LCDR3 | artificial | ALWYSNRWV |
| 1664 | H2C-VH | artificial | EVQLVESGGGLVQPGGSLKLSCAASGFTFNKYAMNWVRQAPGKGLEWVARIRSKYNNY |
| | | | ATYYADSVKDRFTISRDDSKNTAYLQMNNLKTEDTAVYYCVRHGNFGNSYISYWAYWG |
| | | | QGTLVTVSS |
| 1665 | H2C-VL | artificial | QTVVTQEPSLTVSPGGTVTLTCGSSTGAVTSGYYPNWVQQKPGQAPRGLIGGTKFLAP |
| | | | GTPARFSGSLLGGKAALTLSGVQPEDEAEYYCALWYSNRWVFGGGTKLTVL |
| 1666 | H2C_HC_A89I | artificial | EVQLVESGGGLVQPGGSLKLSCAASGFTFNKYAMNWVRQAPGKGLEWVARIRSKYNNY |
| | -VH | | ATYYADSVKDRFTISRDDSKNTIYLQMNNLKTEDTAVYYCVRHGNFGNSYISYWAYWG |
| | | | QGTLVTVSS |
| 1667 | H2C_HC_A89I | artificial | QTVVTQEPSLTVSPGGTVTLTCGSSTGAVTSGYYPNWVQQKPGQAPRGLIGGTKFLAP |
| | -VL | | GTPARFSGSLLGGKAALTLSGVQPEDEAEYYCALWYSNRWVFGGGTKLTVL |
| 1668 | H2C_HC_A89L | artificial | EVQLVESGGGLVQPGGSLKLSCAASGFTFNKYAMNWVRQAPGKGLEWVARIRSKYNNY |
| | -VH | | ATYYADSVKDRFTISRDDSKNTLYLQMNNLKTEDTAVYYCVRHGNFGNSYISYWAYWG |
| | | | QGTLVTVSS |
| 1669 | H2C_HC_A89L | artificial | QTVVTQEPSLTVSPGGTVTLTCGSSTGAVTSGYYPNWVQQKPGQAPRGLIGGTKFLAP |
| | -VL | | GTPARFSGSLLGGKAALTLSGVQPEDEAEYYCALWYSNRWVFGGGTKLTVL |
| 1670 | H2C_HC_A89T | artificial | EVQLVESGGGLVQPGGSLKLSCAASGFTFNKYAMNWVRQAPGKGLEWVARIRSKYNNY |
| | -VH | | ATYYADSVKDRFTISRDDSKNTTYLQMNNLKTEDTAVYYCVRHGNFGNSYISYWAYWG |
| | | | QGTLVTVSS |
| 1671 | H2C_HC_A89T | artificial | QTVVTQEPSLTVSPGGTVTLTCGSSTGAVTSGYYPNWVQQKPGQAPRGLIGGTKFLAP |
| | -VL | | GTPARFSGSLLGGKAALTLSGVQPEDEAEYYCALWYSNRWVFGGGTKLTVL |
| 1672 | H2C_HC_A89V | artificial | EVQLVESGGGLVQPGGSLKLSCAASGFTFNKYAMNWVRQAPGKGLEWVARIRSKYNNY |
| | -VH | | ATYYADSVKDRFTISRDDSKNTVYLQMNNLKTEDTAVYYCVRHGNFGNSYISYWAYWG |
| | | | QGTLVTVSS |
| 1673 | H2C_HC_A89V | artificial | QTVVTQEPSLTVSPGGTVTLTCGSSTGAVTSGYYPNWVQQKPGQAPRGLIGGTKFLAP |
| | -VL | | GTPARFSGSLLGGKAALTLSGVQPEDEAEYYCALWYSNRWVFGGGTKLTVL |
| 1674 | H2C_HC_L52M | artificial | EVQLVESGGGLVQPGGSLKLSCAASGFTFNKYAMNWVRQAPGKGMEWVARIRSKYNNY |
| | -VH | | ATYYADSVKDRFTISRDDSKNTAYLQMNNLKTEDTAVYYCVRHGNFGNSYISYWAYWG |
| | | | QGTLVTVSS |
| 1675 | H2C_HC_L52M | artificial | QTVVTQEPSLTVSPGGTVTLTCGSSTGAVTSGYYPNWVQQKPGQAPRGLIGGTKFLAP |
| | -VL | | GTPARFSGSLLGGKAALTLSGVQPEDEAEYYCALWYSNRWVFGGGTKLTVL |
| 1676 | H2C_HC_L52M_ | artificial | EVQLVESGGGLVQPGGSLKLSCAASGFTFNKYAMNWVRQAPGKGMEWVARIRSKYNNY |
| | LC_L21I_ | | ATYYADSVKDRFTISRDDSKNTAYLQMNNLKTEDTAVYYCVRHGNFGNSYISYWAYWG |
| | Q46K_G141S- | | QGTLVTVSS |
| | VH | | |
| 1677 | H2C_HC_L52M_ | artificial | QTVVTQEPSLTVSPGGTVTITCGSSTGAVTSGYYPNWVQKKPGQAPRGLIGGTKFLAP |
| | LC_L21I_ | | GTPARFSGSLLGGKAALTLSGVQPEDEAEYYCALWYSNRWVFGSGTKLTVL |
| | Q46K_G141S | | |
| | VL | | |
| 1678 | H2C_HC_L52M_ | artificial | EVQLVESGGGLVQPGGSLKLSCAASGFTFNKYAMNWVRQAPGKGMEWVARIRSKYNNY |
| | LC_Q46K- | | ATYYADSVKDRFTISRDDSKNTAYLQMNNLKTEDTAVYYCVRHGNFGNSYISYWAYWG |
| | VH | | QGTLVTVSS |
| 1679 | H2C_HC_L52M_ | artificial | QTVVTQEPSLTVSPGGTVTLTCGSSTGAVTSGYYPNWVQKKPGQAPRGLIGGTKFLAP |
| | LC_Q46K- | | GTPARFSGSLLGGKAALTLSGVQPEDEAEYYCALWYSNRWVFGGGTKLTVL |
| | VL | | |
| 1680 | H2C_HC_L52M_ | artificial | EVQLVESGGGLVQPGGSLKLSCAASGFTFNKYAMNWVRQAPGKGMEWVARIRSKYNNY |
| | LC_Q46K_ | | ATYYADSVKDRFTISRDDSKNTAYLQMNNLKTEDTAVYYCVRHGNFGNSYISYWAYWG |
| | G141S-VH | | QGTLVTVSS |
| 1681 | H2C_HC_L52M_ | artificial | QTVVTQEPSLTVSPGGTVTLTCGSSTGAVTSGYYPNWVQKKPGQAPRGLIGGTKFLAP |
| | LC_Q46K_ | | GTPARFSGSLLGGKAALTLSGVQPEDEAEYYCALWYSNRWVFGSGTKLTVL |
| | G141S-VL | | |
| 1682 | H2C_HC_L52V_ | artificial | EVQLVESGGGLVQPGGSLKLSCAASGFTFNKYAMNWVRQAPGKGVEWVARIRSKYNNY |
| | -VH | | ATYYADSVKDRFTISRDDSKNTAYLQMNNLKTEDTAVYYCVRHGNFGNSYISYWAYWG |
| | | | QGTLVTVSS |
| 1683 | H2C_HC_L52V | artificial | QTVVTQEPSLTVSPGGTVTLTCGSSTGAVTSGYYPNWVQQKPGQAPRGLIGGTKFLAP |
| | -VL | | GTPARFSGSLLGGKAALTLSGVQPEDEAEYYCALWYSNRWVFGGGTKLTVL |
| 1684 | H2C_HC_L52V_ | artificial | EVQLVESGGGLVQPGGSLKLSCAASGFTFNKYAMNWVRQAPGKGVEWVARIRSKYNNY |
| | LC_V44F- | | ATYYADSVKDRFTISRDDSKNTAYLQMNNLKTEDTAVYYCVRHGNFGNSYISYWAYWG |
| | VH | | QGTLVTVSS |
| 1685 | H2C_HC_L52V_ | artificial | QTVVTQEPSLTVSPGGTVTLTCGSSTGAVTSGYYPNWFQQKPGQAPRGLIGGTKFLAP |
| | LC_V44F- | | GTPARFSGSLLGGKAALTLSGVQPEDEAEYYCALWYSNRWVFGGGTKLTVL |
| | VL | | |
| 1686 | H2C_HC_L52V_ | artificial | EVQLVESGGGLVQPGGSLKLSCAASGFTFNKYAMNWVRQAPGKGVEWVARIRSKYNNY |
| | LC_V44Y- | | ATYYADSVKDRFTISRDDSKNTAYLQMNNLKTEDTAVYYCVRHGNFGNSYISYWAYWG |
| | VH | | QGTLVTVSS |
| 1687 | H2C_HC_L52V_ | artificial | QTVVTQEPSLTVSPGGTVTLTCGSSTGAVTSGYYPNWYQQKPGQAPRGLIGGTKFLAP |
| | LC_V44Y- | | GTPARFSGSLLGGKAALTLSGVQPEDEAEYYCALWYSNRWVFGGGTKLTVL |
| | VL | | |
| 1688 | H2C_HC_M41F_ | artificial | KYAFN |
| | A89V-HCDR1 | | |
| 1689 | H2C_HC_M41F_ | artificial | RIRSKYNNYATYYADSVKD |
| | A89V-HCDR2 | | |
| 1690 | H2C_HC_M41F_ | artificial | HGNFGNSYISYWAY |
| | A89V-HCDR3 | | |
| 1691 | H2C_HC_M41F_ | artificial | GSSTGAVTSGYYPN |
| | A89V- | | |
| | LCDR1 | | |
| 1692 | H2C_HC_M41F_ | artificial | GTKFLAP |
| | A89V- | | |
| | LCDR2 | | |
| 1693 | H2C_HC_M41F_ | artificial | ALWYSNRWV |
| | A89V- | | |
| | LCDR3 | | |
| 1694 | H2C_HC_M41F_ | artificial | EVQLVESGGGLVQPGGSLKLSCAASGFTFNKYAFNWVRQAPGKGLEWVARIRSKYNNY |
| | A89V-VH | | ATYYADSVKDRFTISRDDSKNTVYLQMNNLKTEDTAVYYCVRHGNFGNSYISYWAYWG |
| | | | QGTLVTVSS |
| 1695 | H2C_HC_M41F_ | artificial | QTVVTQEPSLTVSPGGTVTLTCGSSTGAVTSGYYPNWVQQKPGQAPRGLIGGTKFLAP |
| | A89V-VL | | GTPARFSGSLLGGKAALTLSGVQPEDEAEYYCALWYSNRWVFGGGTKLTVL |
| 1696 | H2C_HC_M41I | artificial | KYAIN |
| | -HCDR1 | | |
| 1697 | H2C_HC_M41I | artificial | RIRSKYNNYATYYADSVKD |
| | -HCDR2 | | |
| 1698 | H2C_HC_M41I | artificial | HGNFGNSYISYWAY |
| | -HCDR3 | | |
| 1699 | H2C_HC_M41I | artificial | GSSTGAVTSGYYPN |
| | -LCDR1 | | |
| 1700 | H2C_HC_M41I | artificial | GTKFLAP |
| | -LCDR2 | | |
| 1701 | H2C_HC_M41I | artificial | ALWYSNRWV |
| | -LCDR3 | | |
| 1702 | H2C_HC_M41I | artificial | EVQLVESGGGLVQPGGSLKLSCAASGFTFNKYAINWVRQAPGKGLEWVARIRSKYNNY |
| | -VH | | ATYYADSVKDRFTISRDDSKNTAYLQMNNLKTEDTAVYYCVRHGNFGNSYISYWAYWG |
| | | | QGTLVTVSS |
| 1703 | H2C_HC_M41I | artificial | QTVVTQEPSLTVSPGGTVTLTCGSSTGAVTSGYYPNWVQQKPGQAPRGLIGGTKFLAP |
| | -VL | | GTPARFSGSLLGGKAALTLSGVQPEDEAEYYCALWYSNRWVFGGGTKLTVL |
| 1704 | H2C_HC_M41I_ | artificial | EVQLVESGGGLVQPGGSLKLSCAASGFTFNKYAINWVRQAPGKGLEWVARIRSKYNNY |
| | A89L-VH | | ATYYADSVKDRFTISRDDSKNTLYLQMNNLKTEDTAVYYCVRHGNFGNSYISYWAYWG |
| | | | QGTLVTVSS |
| 1705 | H2C_HC_M41I_ | artificial | QTVVTQEPSLTVSPGGTVTLTCGSSTGAVTSGYYPNWVQQKPGQAPRGLIGGTKFLAP |
| | A89L-VL | | GTPARFSGSLLGGKAALTLSGVQPEDEAEYYCALWYSNRWVFGGGTKLTVL |
| 1706 | H2C_HC_M41I_ | artificial | EVQLVESGGGLVQPGGSLKLSCAASGFTENKYAINWVRQAPGKGLEWVARIRSKYNNY |
| | A89V-VH | | ATYYADSVKDRFTISRDDSKNTVYLQMNNLKTEDTAVYYCVRHGNFGNSYISYWAYWG |
| | | | QGTLVTVSS |
| 1707 | H2C_HC_M41I_ | artificial | QTVVTQEPSLTVSPGGTVTLTCGSSTGAVTSGYYPNWVQQKPGQAPRGLIGGTKFLAP |
| | A89V-VL | | GTPARFSGSLLGGKAALTLSGVQPEDEAEYYCALWYSNRWVFGGGTKLTVL |
| 1708 | H2C_HC_M41I_ | artificial | EVQLVESGGGLVQPGGSLKLSCAASGFTFNKYAINWVRQAPGKGLEWVARIRSKYNNY |
| | A89V_LC_ | | ATYYADSVKDRFTISRDDSKNTVYLQMNNLKTEDTAVYYCVRHGNFGNSYISYWAYWG |
| | L21I_Q46K_ | | QGTLVTVSS |
| | G141S-VH | | |
| 1709 | H2C_HC_M41I_ | artificial | QTVVTQEPSLTVSPGGTVTITCGSSTGAVTSGYYPNWVQKKPGQAPRGLIGGTKFLAP |
| | A89V_LC_ | | GTPARFSGSLLGGKAALTLSGVQPEDEAEYYCALWYSNRWVFGSGTKLTVL |
| | L21I_Q46K_ | | |
| | G141S-VL | | |
| 1710 | H2C_HC_M41I_ | artificial | EVQLVESGGGLVQPGGSLKLSCAASGFTFNKYAINWVRQAPGKGLEWVARIRSKYNNY |
| | A89V_LC_ | | ATYYADSVKDRFTISRDDSKNTVYLQMNNLKTEDTAVYYCVRHGNFGNSYISYWAYWG |
| | Q46K-VH | | QGTLVTVSS |
| 1711 | H2C_HC_M41I_ | artificial | QTVVTQEPSLTVSPGGTVTLTCGSSTGAVTSGYYPNWVQKKPGQAPRGLIGGTKFLAP |
| | A89V_LC_ | | GTPARFSGSLLGGKAALTLSGVQPEDEAEYYCALWYSNRWVFGGGTKLTVL |
| | Q46K-VL | | |
| 1712 | H2C_HC_M41I_ | artificial | EVQLVESGGGLVQPGGSLKLSCAASGFTFNKYAINWVRQAPGKGVEWVARIRSKYNNY |
| | L52V_A89V_ | | ATYYADSVKDRFTISRDDSKNTVYLQMNNLKTEDTAVYYCVRHGNFGNSYISYWAYWG |
| | LC_L21I_ | | QGTLVTVSS |
| | Q46K_G141S_ | | |
| | V44F-VH | | |
| 1713 | H2C_HC_M41I_ | artificial | QTVVTQEPSLTVSPGGTVTITCGSSTGAVTSGYYPNWFQKKPGQAPRGLIGGTKFLAP |
| | L52V_A89_ | | GTPARFSGSLLGGKAALTLSGVQPEDEAEYYCALWYSNRWVFGSGTKLTVL |
| | LC_L21I_ | | |
| | Q46K_G141S_ | | |
| | V44F-VL | | |
| 1714 | H2C_HC_M41I_ | artificial | EVQLVESGGGLVQPGGSLKLSCAASGFTFNKYAINWVRQAPGKGLEWVARIRSKYNNY |
| | LC_L21I_ | | ATYYADSVKDRFTISRDDSKNTAYLQMNNLKTEDTAVYYCVRHGNFGNSYISYWAYWG |
| | Q46K_G141S- | | QGTLVTVSS |
| | VH | | |
| 1715 | H2C_HC_M41I_ | artificial | QTVVTQEPSLTVSPGGTVTITCGSSTGAVTSGYYPNWVQKKPGQAPRGLIGGTKFLAP |
| | LC_L21I_ | | GTPARFSGSLLGGKAALTLSGVQPEDEAEYYCALWYSNRWVFGSGTKLTVL |
| | Q46K_G141S- | | |
| | VL | | |
| 1716 | H2C_HC_M41I_ | artificial | EVQLVESGGGLVQPGGSLKLSCAASGFTFNKYAINWVREAPGKGLEWVARIRSKYNNY |
| | Q46E_A89V_ | | ATYYADSVKDRFTISRDDSKNTVYLQMNNLKTEDTAVYYCVRHGNFGNSYISYWAYWG |
| | LC_L21I_ | | QGTLVTVSS |
| | KQ46_G141S- | | |
| | VH | | |
| 1717 | H2C_HC_M41I_ | artificial | QTVVTQEPSLTVSPGGTVTITCGSSTGAVTSGYYPNWVQKKPGQAPRGLIGGTKFLAP |
| | Q46E_A89V_ | | GTPARFSGSLLGGKAALTLSGVQPEDEAEYYCALWYSNRWVFGSGTKLTVL |
| | LC_L21I_ | | |
| | Q46K_G141S- | | |
| | VL | | |
| 1718 | H2C_HC_M41V | artificial | KYAVN |
| | -HCDR1 | | |
| 1719 | H2C_HC_M41V | artificial | RIRSKYNNYATYYADSVKD |
| | -HCDR2 | | |
| 1720 | H2C_HC_M41V | artificial | HGNFGNSYISYWAY |
| | -HCDR3 | | |
| 1721 | H2C_HC_M41V | artificial | GSSTGAVTSGYYPN |
| | -LCDR1 | | |
| 1722 | H2C_HC_M41V | artificial | GTKFLAP |
| | -LCDR2 | | |
| 1723 | H2C_HC_M41V | artificial | ALWYSNRWV |
| | -LCDR3 | | |
| 1724 | H2C_HC_M41V | artificial | EVQLVESGGGLVQPGGSLKLSCAASGFTFNKYAVNWVRQAPGKGLEWVARIRSKYNNY |
| | -VH | | ATYYADSVKDRFTISRDDSKNTAYLQMNNLKTEDTAVYYCVRHGNFGNSYISYWAYWG |
| | | | QGTLVTVSS |
| 1725 | H2C_HC_M41V | artificial | QTVVTQEPSLTVSPGGTVTLTCGSSTGAVTSGYYPNWVQQKPGQAPRGLIGGTKFLAP |
| | -VL | | GTPARFSGSLLGGKAALTLSGVQPEDEAEYYCALWYSNRWVFGGGTKLTVL |
| 1726 | H2C_HC_Q46D | artificial | EVQLVESGGGLVQPGGSLKLSCAASGFTFNKYAMNWVRDAPGKGLEWVARIRSKYNNY |
| | -VH | | ATYYADSVKDRFTISRDDSKNTAYLQMNNLKTEDTAVYYCVRHGNFGNSYISYWAYWG |
| | | | QGTLVTVSS |
| 1727 | H2C_HC_Q46D | artificial | QTVVTQEPSLTVSPGGTVTLTCGSSTGAVTSGYYPNWVQQKPGQAPRGLIGGTKFLAP |
| | -VL | | GTPARFSGSLLGGKAALTLSGVQPEDEAEYYCALWYSNRWVFGGGTKLTVL |
| 1728 | H2C_HC_Q46D_ | artificial | EVQLVESGGGLVQPGGSLKLSCAASGFTFNKYAMNWVRDAPGKGLEWVARIRSKYNNY |
| | LC_L21I_ | | ATYYADSVKDRFTISRDDSKNTAYLQMNNLKTEDTAVYYCVRHGNFGNSYISYWAYWG |
| | Q46K_G141S- | | QGTLVTVSS |
| | VH | | |
| 1729 | H2C_HC_Q46D_ | artificial | QTVVTQEPSLTVSPGGTVTITCGSSTGAVTSGYYPNWVQKKPGQAPRGLIGGTKFLAP |
| | LC_L21I_ | | GTPARFSGSLLGGKAALTLSGVQPEDEAEYYCALWYSNRWVFGSGTKLTVL |
| | Q46K_G141S- | | |
| | VL | | |
| 1730 | H2C_HC_Q46D_ | artificial | EVQLVESGGGLVQPGGSLKLSCAASGFTFNKYAMNWVRDAPGKGLEWVARIRSKYNNY |
| | LC_L21I_ | | ATYYADSVKDRFTISRDDSKNTAYLQMNNLKTEDTAVYYCVRHGNFGNSYISYWAYWG |
| | Q46R_G141S- | | QGTLVTVSS |
| | VH | | |
| 1731 | H2C_HC_Q46D_ | artificial | QTVVTQEPSLTVSPGGTVTITCGSSTGAVTSGYYPNWVQRKPGQAPRGLIGGTKFLAP |
| | LC_L21I_ | | GTPARFSGSLLGGKAALTLSGVQPEDEAEYYCALWYSNRWVFGSGTKLTVL |
| | Q46R_G141S- | | |
| | VL | | |
| 1732 | H2C_HC_Q46D_ | artificial | EVQLVESGGGLVQPGGSLKLSCAASGFTENKYAMNWVRDAPGKGLEWVARIRSKYNNY |
| | LC_Q46K- | | ATYYADSVKDRFTISRDDSKNTAYLQMNNLKTEDTAVYYCVRHGNFGNSYISYWAYWG |
| | VH | | QGTLVTVSS |
| 1733 | H2C_HC_Q46D_ | artificial | QTVVTQEPSLTVSPGGTVTLTCGSSTGAVTSGYYPNWVQKKPGQAPRGLIGGTKFLAP |
| | LC_Q46K- | | GTPARFSGSLLGGKAALTLSGVQPEDEAEYYCALWYSNRWVFGGGTKLTVL |
| | VL | | |
| 1734 | H2C_HC_Q46D_ | artificial | EVQLVESGGGLVQPGGSLKLSCAASGFTFNKYAMNWVRDAPGKGLEWVARIRSKYNNY |
| | LC_Q46K_ | | ATYYADSVKDRFTISRDDSKNTAYLQMNNLKTEDTAVYYCVRHGNFGNSYISYWAYWG |
| | G141S-VH | | QGTLVTVSS |
| 1735 | H2C_HC_Q46D_ | artificial | QTVVTQEPSLTVSPGGTVTLTCGSSTGAVTSGYYPNWVQKKPGQAPRGLIGGTKFLAP |
| | LC_Q46K_ | | GTPARFSGSLLGGKAALTLSGVQPEDEAEYYCALWYSNRWVFGSGTKLTVL |
| | 4G11S-VL | | |
| 1736 | H2C_HC_Q46D_ | artificial | EVQLVESGGGLVQPGGSLKLSCAASGFTFNKYAMNWVRDAPGKGLEWVARIRSKYNNY |
| | LC_Q46R- | | ATYYADSVKDRFTISRDDSKNTAYLQMNNLKTEDTAVYYCVRHGNFGNSYISYWAYWG |
| | VH | | QGTLVTVSS |
| 1737 | H2C_HC_Q46D_ | artificial | QTVVTQEPSLTVSPGGTVTLTCGSSTGAVTSGYYPNWVQRKPGQAPRGLIGGTKFLAP |
| | LC_Q46R- | | GTPARFSGSLLGGKAALTLSGVQPEDEAEYYCALWYSNRWVFGGGTKLTVL |
| | VL | | |
| 1738 | H2C_HC_Q46D_ | artificial | EVQLVESGGGLVQPGGSLKLSCAASGFTENKYAMNWVRDAPGKGLEWVARIRSKYNNY |
| | LC_Q46R_ | | ATYYADSVKDRFTISRDDSKNTAYLQMNNLKTEDTAVYYCVRHGNFGNSYISYWAYWG |
| | G141S-VH | | QGTLVTVSS |
| 1739 | H2C_HC_Q46D_ | artificial | QTVVTQEPSLTVSPGGTVTLTCGSSTGAVTSGYYPNWVQRKPGQAPRGLIGGTKFLAP |
| | LC_Q46R_ | | GTPARFSGSLLGGKAALTLSGVQPEDEAEYYCALWYSNRWVFGSGTKLTVL |
| | G141S-VL | | |
| 1740 | H2C_HC_Q46E | artificial | EVQLVESGGGLVQPGGSLKLSCAASGFTFNKYAMNWVREAPGKGLEWVARIRSKYNNY |
| | -VH | | ATYYADSVKDRFTISRDDSKNTAYLQMNNLKTEDTAVYYCVRHGNFGNSYISYWAYWG |
| | | | QGTLVTVSS |
| 1741 | H2C_HC_Q46E | artificial | QTVVTQEPSLTVSPGGTVTLTCGSSTGAVTSGYYPNWVQQKPGQAPRGLIGGTKFLAP |
| | -VL | | GTPARFSGSLLGGKAALTLSGVQPEDEAEYYCALWYSNRWVFGGGTKLTVL |
| 1742 | H2C_HC_Q46E_ | artificial | EVQLVESGGGLVQPGGSLKLSCAASGFTENKYAMNWVREAPGKGLEWVARIRSKYNNY |
| | LC_L21I_ | | ATYYADSVKDRFTISRDDSKNTAYLQMNNLKTEDTAVYYCVRHGNFGNSYISYWAYWG |
| | Q46K_G141S- | | QGTLVTVSS |
| | VH | | |
| 1743 | H2C_HC_Q46E_ | artificial | QTVVTQEPSLTVSPGGTVTITCGSSTGAVTSGYYPNWVQKKPGQAPRGLIGGTKFLAP |
| | LC_L21I_ | | GTPARFSGSLLGGKAALTLSGVQPEDEAEYYCALWYSNRWVFGSGTKLTVL |
| | Q46K_G141S- | | |
| | VL | | |
| 1744 | H2C_HC_Q46E_ | artificial | EVQLVESGGGLVQPGGSLKLSCAASGFTFNKYAMNWVREAPGKGLEWVARIRSKYNNY |
| | LC_L21I_ | | ATYYADSVKDRFTISRDDSKNTAYLQMNNLKTEDTAVYYCVRHGNFGNSYISYWAYWG |
| | 6Q4R_G141S- | | QGTLVTVSS |
| | VH | | |
| 1745 | H2C_HC_Q46E_ | artificial | QTVVTQEPSLTVSPGGTVTITCGSSTGAVTSGYYPNWVQRKPGQAPRGLIGGTKFLAP |
| | LC_L21I_ | | GTPARFSGSLLGGKAALTLSGVQPEDEAEYYCALWYSNRWVFGSGTKLTVL |
| | Q46R_G141S- | | |
| | VL | | |
| 1746 | H2C_HC_Q46E_ | artificial | EVQLVESGGGLVQPGGSLKLSCAASGFTFNKYAMNWVREAPGKGLEWVARIRSKYNNY |
| | LC_Q46K- | | ATYYADSVKDRFTISRDDSKNTAYLQMNNLKTEDTAVYYCVRHGNFGNSYISYWAYWG |
| | VH | | QGTLVTVSS |
| 1747 | H2C_HC_Q46E_ | artificial | QTVVTQEPSLTVSPGGTVTLTCGSSTGAVTSGYYPNWVQKKPGQAPRGLIGGTKFLAP |
| | LC_Q46K- | | GTPARFSGSLLGGKAALTLSGVQPEDEAEYYCALWYSNRWVFGGGTKLTVL |
| | VL | | |
| 1748 | H2C_HC_Q46E_ | artificial | EVQLVESGGGLVQPGGSLKLSCAASGFTFNKYAMNWVREAPGKGLEWVARIRSKYNNY |
| | LC_Q46K_ | | ATYYADSVKDRFTISRDDSKNTAYLQMNNLKTEDTAVYYCVRHGNFGNSYISYWAYWG |
| | G141S-VH | | QGTLVTVSS |
| 1749 | H2C_HC_Q46E_ | artificial | QTVVTQEPSLTVSPGGTVTLTCGSSTGAVTSGYYPNWVQKKPGQAPRGLIGGTKFLAP |
| | LC_Q46K_ | | GTPARFSGSLLGGKAALTLSGVQPEDEAEYYCALWYSNRWVFGSGTKLTVL |
| | G141S-VL | | |
| 1750 | H2C_HC_Q46E_ | artificial | EVQLVESGGGLVQPGGSLKLSCAASGFTFNKYAMNWVREAPGKGLEWVARIRSKYNNY |
| | LC_Q46R- | | ATYYADSVKDRFTISRDDSKNTAYLQMNNLKTEDTAVYYCVRHGNFGNSYISYWAYWG |
| | VH | | QGTLVTVSS |
| 1751 | H2C_HC_Q46E_ | artificial | QTVVTQEPSLTVSPGGTVTLTCGSSTGAVTSGYYPNWVQRKPGQAPRGLIGGTKFLAP |
| | LC_Q46R- | | GTPARFSGSLLGGKAALTLSGVQPEDEAEYYCALWYSNRWVFGGGTKLTVL |
| | VL | | |
| 1752 | H2C_HC_Q46E_ | artificial | EVQLVESGGGLVQPGGSLKLSCAASGFTENKYAMNWVREAPGKGLEWVARIRSKYNNY |
| | LC_Q46R_ | | ATYYADSVKDRFTISRDDSKNTAYLQMNNLKTEDTAVYYCVRHGNFGNSYISYWAYWG |
| | 4G11S-VH | | QGTLVTVSS |
| 1753 | H2C_HC_Q46E_ | artificial | QTVVTQEPSLTVSPGGTVTLTCGSSTGAVTSGYYPNWVQRKPGQAPRGLIGGTKFLAP |
| | LC_Q46R_ | | GTPARFSGSLLGGKAALTLSGVQPEDEAEYYCALWYSNRWVFGSGTKLTVL |
| | G141S-VL | | |
| 1754 | H2C_HC_Q46K | artificial | EVQLVESGGGLVQPGGSLKLSCAASGFTFNKYAMNWVRKAPGKGLEWVARIRSKYNNY |
| | -VH | | ATYYADSVKDRFTISRDDSKNTAYLQMNNLKTEDTAVYYCVRHGNFGNSYISYWAYWG |
| | | | QGTLVTVSS |
| 1755 | H2C_HC_Q46K | artificial | QTVVTQEPSLTVSPGGTVTLTCGSSTGAVTSGYYPNWVQQKPGQAPRGLIGGTKFLAP |
| | -VL | | GTPARFSGSLLGGKAALTLSGVQPEDEAEYYCALWYSNRWVFGGGTKLTVL |
| 1756 | H2C_HC_Q46R | artificial | EVQLVESGGGLVQPGGSLKLSCAASGFTFNKYAMNWVRRAPGKGLEWVARIRSKYNNY |
| | -VH | | ATYYADSVKDRFTISRDDSKNTAYLQMNNLKTEDTAVYYCVRHGNFGNSYISYWAYWG |
| | | | QGTLVTVSS |
| 1757 | H2C_HC_Q46R | artificial | QTVVTQEPSLTVSPGGTVTLTCGSSTGAVTSGYYPNWVQQKPGQAPRGLIGGTKFLAP |
| | -VL | | GTPARFSGSLLGGKAALTLSGVQPEDEAEYYCALWYSNRWVFGGGTKLTVL |
| 1758 | H2C_HC_V107A- | artificial | EVQLVESGGGLVQPGGSLKLSCAASGFTFNKYAMNWVRQAPGKGLEWVARIRSKYNNY |
| | VH | | ATYYADSVKDRFTISRDDSKNTAYLQMNNLKTEDTAVYYCARHGNFGNSYISYWAYWG |
| | | | QGTLVTVSS |
| 1759 | H2C_HC_V107A- | artificial | QTVVTQEPSLTVSPGGTVTLTCGSSTGAVTSGYYPNWVQQKPGQAPRGLIGGTKFLAP |
| | VL | | GTPARFSGSLLGGKAALTLSGVQPEDEAEYYCALWYSNRWVFGGGTKLTVL |
| 1760 | H2C_HC_V107L- | artificial | EVQLVESGGGLVQPGGSLKLSCAASGFTFNKYAMNWVRQAPGKGLEWVARIRSKYNNY |
| | VH | | ATYYADSVKDRFTISRDDSKNTAYLQMNNLKTEDTAVYYCLRHGNFGNSYISYWAYWG |
| | | | QGTLVTVSS |
| 1761 | H2C_HC_V107L- | artificial | QTVVTQEPSLTVSPGGTVTLTCGSSTGAVTSGYYPNWVQQKPGQAPRGLIGGTKFLAP |
| | VL | | GTPARFSGSLLGGKAALTLSGVQPEDEAEYYCALWYSNRWVFGGGTKLTVL |
| 1762 | H2C_HC_W136F- | artificial | KYAMN |
| | HCDR1 | | |
| 1763 | H2C_HC_W136F- | artificial | RIRSKYNNYATYYADSVKD |
| | HCDR2 | | |
| 1764 | H2C_HC_W136F- | artificial | HGNFGNSYISYFAY |
| | HCDR3 | | |
| 1765 | H2C_HC_W136F- | artificial | GSSTGAVTSGYYPN |
| | LCDR1 | | |
| 1766 | H2C_HC_W136F- | artificial | GTKFLAP |
| | LCDR2 | | |
| 1767 | H2C_HC_W136F- | artificial | ALWYSNRWV |
| | LCDR3 | | |
| 1768 | H2C_HC_W136F- | artificial | EVQLVESGGGLVQPGGSLKLSCAASGFTENKYAMNWVRQAPGKGLEWVARIRSKYNNY |
| | VH | | ATYYADSVKDRFTISRDDSKNTAYLQMNNLKTEDTAVYYCVRHGNFGNSYISYFAYWG |
| | | | QGTLVTVSS |
| 1769 | H2C_HC_W136F- | artificial | QTVVTQEPSLTVSPGGTVTLTCGSSTGAVTSGYYPNWVQQKPGQAPRGLIGGTKFLAP |
| | VL | | GTPARFSGSLLGGKAALTLSGVQPEDEAEYYCALWYSNRWVFGGGTKLTVL |
| 1770 | H2C_HC_W136F_ | artificial | EVQLVESGGGLVQPGGSLKLSCAASGFTFNKYAMNWVRQAPGKGLEWVARIRSKYNNY |
| | LC_V44I- | | ATYYADSVKDRFTISRDDSKNTAYLQMNNLKTEDTAVYYCVRHGNFGNSYISYFAYWG |
| | VH | | QGTLVTVSS |
| 1771 | H2C_HC_W136F_ | artificial | QTVVTQEPSLTVSPGGTVTLTCGSSTGAVTSGYYPNWIQQKPGQAPRGLIGGTKFLAP |
| | LC_V44I- | | GTPARFSGSLLGGKAALTLSGVQPEDEAEYYCALWYSNRWVFGGGTKLTVL |
| | VL | | |
| 1772 | H2C_HC_W136F_ | artificial | EVQLVESGGGLVQPGGSLKLSCAASGFTFNKYAMNWVRQAPGKGLEWVARIRSKYNNY |
| | LC_V44L- | | ATYYADSVKDRFTISRDDSKNTAYLQMNNLKTEDTAVYYCVRHGNFGNSYISYFAYWG |
| | VH | | QGTLVTVSS |
| 1773 | H2C_HC_W136F_ | artificial | QTVVTQEPSLTVSPGGTVTLTCGSSTGAVTSGYYPNWLQQKPGQAPRGLIGGTKFLAP |
| | LC_V44L- | | GTPARFSGSLLGGKAALTLSGVQPEDEAEYYCALWYSNRWVFGGGTKLTVL |
| | VL | | |
| 1774 | H2C_I2E- | artificial | KYAIN |
| | HCDR1 | | |
| 1775 | H2C_I2E- | artificial | RIRSKYNNYATYYADAVKD |
| | HCDR2 | | |
| 1776 | H2C_I2E- | artificial | AGNFGSSYISYWAY |
| | HCDR3 | | |
| 1777 | H2C_I2E- | artificial | GSSTGAVTSGYYPN |
| | LCDR1 | | |
| 1778 | H2C_I2E- | artificial | GTKFLAP |
| | LCDR2 | | |
| 1779 | H2C_I2E- | artificial | ALWYSNRWV |
| | LCDR3 | | |
| 1780 | H2C_I2E- | artificial | EVQLVESGGGLVQPGGSLKLSCAASGFTFNKYAINWVRQAPGKGLEWVARIRSKYNNY |
| | VH | | ATYYADAVKDRFTISRDDSKNTVYLQMNNLKTEDTAVYYCARAGNFGSSYISYWAYWG |
| | | | QGTLVTVSS |
| 1781 | H2C_I2E- | artificial | QTVVTQEPSLTVSPGGTVTITCGSSTGAVTSGYYPNWVQKKPGQAPRGLIGGTKFLAP |
| | VL | | GTPARFSGSLSGGKAALTLSGVQPEDEAEYYCALWYSNRWVFGSGTKLTVL |
| 1782 | H2C_I2K- | artificial | KYAMN |
| | HCDR1 | | |
| 1783 | H2C_I2K- | artificial | RIRSKYNNYATYYAEAVKG |
| | HCDR2 | | |
| 1784 | H2C_I2K- | artificial | NENIGTSYISYWAY |
| | HCDR3 | | |
| 1785 | H2C_I2K- | artificial | GSSTGAVTSGYYPN |
| | LCDR1 | | |
| 1786 | H2C_I2K- | artificial | GTKFLAP |
| | LCDR2 | | |
| 1787 | H2C_I2K- | artificial | ALWYSNRWV |
| | LCDR3 | | |
| 1788 | H2C_I2K- | artificial | EVQLVESGGGLVQPGGSLKLSCAASGFTFNKYAMNWVRQAPGKGLEWVARIRSKYNNY |
| | VH | | ATYYAEAVKGRFTISRDDSKNTVYLQMNNLKTEDTAVYYCVRNENIGTSYISYWAYWG |
| | | | QGTLVTVSS |
| 1789 | H2C_I2K- | artificial | QTVVTQEPSLTVSPGGTVTITCGSSTGAVTSGYYPNWVQQKPGQAPRGLIGGTKFLAP |
| | VL | | GTPARFSGSLSGGKAALTLSGVQPEDEAEYYCALWYSNRWVFGSGTKLTVL |
| 1790 | H2C_I2L- | artificial | KYAMN |
| | HCDR1 | | |
| 1791 | H2C_I2L- | artificial | RIRSKYNNYATYYADAVKD |
| | HCDR2 | | |
| 1792 | H2C_I2L- | artificial | AGNFGSSYISYFAY |
| | HCDR3 | | |
| 1793 | H2C_I2L- | artificial | GSSTGAVTSGYYPN |
| | LCDR1 | | |
| 1794 | H2C_I2L- | artificial | GTKFLAP |
| | LCDR2 | | |
| 1795 | H2C_I2L- | artificial | ALYYSNRWV |
| | LCDR3 | | |
| 1796 | H2C_I2L- | artificial | EVQLVESGGGLVQPGGSLKLSCAASGFTFNKYAMNWVRQAPGKGMEWVARIRSKYNNY |
| | VH | | ATYYADAVKDRFTISRDDSKNTLYLQMNNLKTEDTAVYYCVRAGNFGSSYISYFAYWG |
| | | | QGTLVTVSS |
| 1797 | H2C_I2L- | artificial | QTVVTQEPSLTVSPGGTVTITCGSSTGAVTSGYYPNWIQKKPGQAPRGLIGGTKFLAP |
| | VL | | GTPARFSGSLEGGKAALTLSGVQPEDEAEYYCALYYSNRWVFGSGTKLTVL |
| 1798 | H2C_I2M- | artificial | KYAMN |
| | HCDR1 | | |
| 1799 | H2C_I2M- | artificial | RIRSKYNNYATYYADAVKD |
| | HCDR2 | | |
| 1800 | H2C_I2M- | artificial | AGNFGTSYISYWAY |
| | HCDR3 | | |
| 1801 | H2C_I2M- | artificial | GSSTGAVTSGYYPN |
| | LCDR1 | | |
| 1802 | H2C_I2M- | artificial | GTKFLAP |
| | LCDR2 | | |
| 1803 | H2C_I2M- | artificial | ALWYSNRWV |
| | LCDR3 | | |
| 1804 | H2C_I2M- | artificial | EVQLVESGGGLVQPGGSLKLSCAASGFTFNKYAMNWVRQAPGKGMEWVARIRSKYNNY |
| | VH | | ATYYADAVKDRFTISRDDSKNTLYLQMNNLKTEDTAVYYCVRAGNFGTSYISYWAYWG |
| | | | QGTLVTVSS |
| 1805 | H2C_I2M- | artificial | QTVVTQEPSLTVSPGGTVTITCGSSTGAVTSGYYPNWVQKKPGQAPRGLIGGTKFLAP |
| | VL | | GTPARFSGSLSGGKAALTLSGVQPEDEAEYYCALWYSNRWVFGSGTKLTVL |
| 1806 | H2C_I2M2- | artificial | KYAIN |
| | HCDR1 | | |
| 1807 | H2C_I2M2- | artificial | RIRSKYNNYATYYADAVKD |
| | HCDR2 | | |
| 1808 | H2C_I2M2- | artificial | NANFGTSYISYFAY |
| | HCDR3 | | |
| 1809 | H2C_I2M2- | artificial | GSSTGAVTSGYYPN |
| | LCDR1 | | |
| 1810 | H2C_I2M2- | artificial | GTKFLAP |
| | LCDR2 | | |
| 1811 | H2C_I2M2- | artificial | ALWYSNRWV |
| | LCDR3 | | |
| 1812 | H2C_I2M2- | artificial | EVQLVESGGGLVQPGGSLKLSCAASGFTFNKYAINWVREAPGKGLEWVARIRSKYNNY |
| | VH | | ATYYADAVKDRFTISRDDSKNTAYLQMNNLKTEDTAVYYCVRNANFGTSYISYFAYWG |
| | | | QGTLVTVSS |
| 1813 | H2C_I2M2- | artificial | QTVVTQEPSLTVSPGGTVTLTCGSSTGAVTSGYYPNWVQKKPGQAPRGLIGGTKFLAP |
| | VL | | GTPARFSGSLLGGKAALTLSGVQPEDEAEYYCALWYSNRWVFGSGTKLTVL |
| 1814 | H2C_LC_G141S- | artificial | EVQLVESGGGLVQPGGSLKLSCAASGFTFNKYAMNWVRQAPGKGLEWVARIRSKYNNY |
| | VH | | ATYYADSVKDRFTISRDDSKNTAYLQMNNLKTEDTAVYYCVRHGNFGNSYISYWAYWG |
| | | | QGTLVTVSS |
| 1815 | H2C_LC_G141S- | artificial | QTVVTQEPSLTVSPGGTVTLTCGSSTGAVTSGYYPNWVQQKPGQAPRGLIGGTKFLAP |
| | VL | | GTPARFSGSLLGGKAALTLSGVQPEDEAEYYCALWYSNRWVFGSGTKLTVL |
| 1816 | H2C_LC_G141S_ | artificial | EVQLVESGGGLVQPGGSLKLSCAASGFTFNKYAMNWVRQAPGKGLEWVARIRSKYNNY |
| | L21I-VH | | ATYYADSVKDRFTISRDDSKNTAYLQMNNLKTEDTAVYYCVRHGNFGNSYISYWAYWG |
| | | | QGTLVTVSS |
| 1817 | H2C_LC_G141S_ | artificial | QTVVTQEPSLTVSPGGTVTITCGSSTGAVTSGYYPNWVQQKPGQAPRGLIGGTKFLAP |
| | L21I-VL | | GTPARFSGSLLGGKAALTLSGVQPEDEAEYYCALWYSNRWVFGSGTKLTVL |
| 1818 | H2C_LC_L83E | artificial | EVQLVESGGGLVQPGGSLKLSCAASGFTFNKYAMNWVRQAPGKGLEWVARIRSKYNNY |
| | -VH | | ATYYADSVKDRFTISRDDSKNTAYLQMNNLKTEDTAVYYCVRHGNFGNSYISYWAYWG |
| | | | QGTLVTVSS |
| 1819 | H2C_LC_L83E | artificial | QTVVTQEPSLTVSPGGTVTLTCGSSTGAVTSGYYPNWVQQKPGQAPRGLIGGTKFLAP |
| | -VL | | GTPARFSGSLEGGKAALTLSGVQPEDEAEYYCALWYSNRWVFGGGTKLTVL |
| 1820 | H2C_LC_L83S | artificial | EVQLVESGGGLVQPGGSLKLSCAASGFTFNKYAMNWVRQAPGKGLEWVARIRSKYNNY |
| | -VH | | ATYYADSVKDRFTISRDDSKNTAYLQMNNLKTEDTAVYYCVRHGNFGNSYISYWAYWG |
| | | | QGTLVTVSS |
| 1821 | H2C_LC_L83S | artificial | QTVVTQEPSLTVSPGGTVTLTCGSSTGAVTSGYYPNWVQQKPGQAPRGLIGGTKFLAP |
| | -VL | | GTPARFSGSLSGGKAALTLSGVQPEDEAEYYCALWYSNRWVFGGGTKLTVL |
| 1822 | H2C_LC_Q46E | artificial | EVQLVESGGGLVQPGGSLKLSCAASGFTFNKYAMNWVRQAPGKGLEWVARIRSKYNNY |
| | -VH | | ATYYADSVKDRFTISRDDSKNTAYLQMNNLKTEDTAVYYCVRHGNFGNSYISYWAYWG |
| | | | QGTLVTVSS |
| 1823 | H2C_LC_Q46E | artificial | QTVVTQEPSLTVSPGGTVTLTCGSSTGAVTSGYYPNWVQEKPGQAPRGLIGGTKFLAP |
| | -VL | | GTPARFSGSLLGGKAALTLSGVQPEDEAEYYCALWYSNRWVFGGGTKLTVL |
| 1824 | H2C_LC_Q46K | artificial | EVQLVESGGGLVQPGGSLKLSCAASGFTFNKYAMNWVRQAPGKGLEWVARIRSKYNNY |
| | -VH | | ATYYADSVKDRFTISRDDSKNTAYLQMNNLKTEDTAVYYCVRHGNFGNSYISYWAYWG |
| | | | QGTLVTVSS |
| 1825 | H2C_LC_Q46K | artificial | QTVVTQEPSLTVSPGGTVTLTCGSSTGAVTSGYYPNWVQKKPGQAPRGLIGGTKFLAP |
| | -VL | | GTPARFSGSLLGGKAALTLSGVQPEDEAEYYCALWYSNRWVFGGGTKLTVL |
| 1826 | H2C_LC_A107L- | artificial | KYAMN |
| | HCDR1 | | |
| 1827 | H2C_LC_A107L- | artificial | RIRSKYNNYATYYADSVKD |
| | HCDR2 | | |
| 1828 | H2C_LC_A107L- | artificial | HGNFGNSYISYWAY |
| | HCDR3 | | |
| 1829 | H2C_LC_A107L- | artificial | GSSTGAVTSGYYPN |
| | LCDR1 | | |
| 1830 | H2C_LC_A107L- | artificial | GTKFLAP |
| | LCDR2 | | |
| 1831 | H2C_LC_A107L- | artificial | LLWYSNRWV |
| | LCDR3 | | |
| 1832 | H2C_LC_A107L- | artificial | EVQLVESGGGLVQPGGSLKLSCAASGFTENKYAMNWVRQAPGKGLEWVARIRSKYNNY |
| | VH | | ATYYADSVKDRFTISRDDSKNTAYLQMNNLKTEDTAVYYCVRHGNFGNSYISYWAYWG |
| | | | QGTLVTVSS |
| 1833 | H2C_LC_A107L- | artificial | QTVVTQEPSLTVSPGGTVTLTCGSSTGAVTSGYYPNWVQQKPGQAPRGLIGGTKFLAP |
| | VL | | GTPARFSGSLLGGKAALTLSGVQPEDEAEYYCLLWYSNRWVFGGGTKLTVL |
| 1834 | H2C_LC_V44I | artificial | EVQLVESGGGLVQPGGSLKLSCAASGFTFNKYAMNWVRQAPGKGLEWVARIRSKYNNY |
| | -VH | | ATYYADSVKDRFTISRDDSKNTAYLQMNNLKTEDTAVYYCVRHGNFGNSYISYWAYWG |
| | | | QGTLVTVSS |
| 1835 | H2C_LC_V44I | artificial | QTVVTQEPSLTVSPGGTVTLTCGSSTGAVTSGYYPNWIQQKPGQAPRGLIGGTKFLAP |
| | -VL | | GTPARFSGSLLGGKAALTLSGVQPEDEAEYYCALWYSNRWVFGGGTKLTVL |
| 1836 | H2C_LC_V44L | artificial | EVQLVESGGGLVQPGGSLKLSCAASGFTFNKYAMNWVRQAPGKGLEWVARIRSKYNNY |
| | -VH | | ATYYADSVKDRFTISRDDSKNTAYLQMNNLKTEDTAVYYCVRHGNFGNSYISYWAYWG |
| | | | QGTLVTVSS |
| 1837 | H2C_LC_V44L | artificial | QTVVTQEPSLTVSPGGTVTLTCGSSTGAVTSGYYPNWLQQKPGQAPRGLIGGTKFLAP |
| | -VL | | GTPARFSGSLLGGKAALTLSGVQPEDEAEYYCALWYSNRWVFGGGTKLTVL |
| 1838 | H2C_LC_V44M | artificial | EVQLVESGGGLVQPGGSLKLSCAASGFTFNKYAMNWVRQAPGKGLEWVARIRSKYNNY |
| | -VH | | ATYYADSVKDRFTISRDDSKNTAYLQMNNLKTEDTAVYYCVRHGNFGNSYISYWAYWG |
| | | | QGTLVTVSS |
| 1839 | H2C_LC_V44M | artificial | QTVVTQEPSLTVSPGGTVTLTCGSSTGAVTSGYYPNWMQQKPGQAPRGLIGGTKFLAP |
| | -VL | | GTPARFSGSLLGGKAALTLSGVQPEDEAEYYCALWYSNRWVFGGGTKLTVL |
| 1840 | H2C_LC_W109Y- | artificial | KYAMN |
| | HCDR1 | | |
| 1841 | H2C_LC_W109Y- | artificial | RIRSKYNNYATYYADSVKD |
| | HCDR2 | | |
| 1842 | H2C_LC_W109Y- | artificial | HGNFGNSYISYWAY |
| | HCDR3 | | |
| 1843 | H2C_LC_W109Y- | artificial | GSSTGAVTSGYYPN |
| | LCDR1 | | |
| 1844 | H2C_LC_W109Y- | artificial | GTKFLAP |
| | LCDR2 | | |
| 1845 | H2C_LC_W109Y- | artificial | ALYYSNRWV |
| | LCDR3 | | |
| 1846 | H2C_LC_W109Y- | artificial | EVQLVESGGGLVQPGGSLKLSCAASGFTFNKYAMNWVRQAPGKGLEWVARIRSKYNNY |
| | VH | | ATYYADSVKDRFTISRDDSKNTAYLQMNNLKTEDTAVYYCVRHGNFGNSYISYWAYWG |
| | | | QGTLVTVSS |
| 1847 | H2C_LC_W109Y- | artificial | QTVVTQEPSLTVSPGGTVTLTCGSSTGAVTSGYYPNWVQQKPGQAPRGLIGGTKFLAP |
| | VL | | GTPARFSGSLLGGKAALTLSGVQPEDEAEYYCALYYSNRWVFGGGTKLTVL |
| 1848 | I2C-HCDR1 | artificial | KYAMN |
| 1849 | I2C-HCDR2 | artificial | RIRSKYNNYATYYADSVKD |
| 1850 | I2C-HCDR3 | artificial | HGNFGNSYISYWAY |
| 1851 | I2C-LCDR1 | artificial | GSSTGAVTSGNYPN |
| 1852 | I2C-LCDR2 | artificial | GTKFLAP |
| 1853 | I2C-LCDR3 | artificial | VLWYSNRWV |
| 1854 | I2C-VH | artificial | EVQLVESGGGLVQPGGSLKLSCAASGFTFNKYAMNWVRQAPGKGLEWVARIRSKYNNY |
| | | | ATYYADSVKDRFTISRDDSKNTAYLQMNNLKTEDTAVYYCVRHGNFGNSYISYWAYWG |
| | | | QGTLVTVSS |
| 1855 | I2C-VL | artificial | QTVVTQEPSLTVSPGGTVTLTCGSSTGAVTSGNYPNWVQQKPGQAPRGLIGGTKFLAP |
| | | | GTPARFSGSLLGGKAALTLSGVQPEDEAEYYCVLWYSNRWVFGGGTKLTVL |
| 1856 | I2C_HC_A89I | artificial | EVQLVESGGGLVQPGGSLKLSCAASGFTENKYAMNWVRQAPGKGLEWVARIRSKYNNY |
| | -VH | | ATYYADSVKDRFTISRDDSKNTIYLQMNNLKTEDTAVYYCVRHGNFGNSYISYWAYWG |
| | | | QGTLVTVSS |
| 1857 | I2C_HC_A89I | artificial | QTVVTQEPSLTVSPGGTVTLTCGSSTGAVTSGNYPNWVQQKPGQAPRGLIGGTKFLAP |
| | -VL | | GTPARFSGSLLGGKAALTLSGVQPEDEAEYYCVLWYSNRWVFGGGTKLTVL |
| 1858 | I2C_HC_A89L | artificial | EVQLVESGGGLVQPGGSLKLSCAASGFTFNKYAMNWVRQAPGKGLEWVARIRSKYNNY |
| | -VH | | ATYYADSVKDRFTISRDDSKNTLYLQMNNLKTEDTAVYYCVRHGNFGNSYISYWAYWG |
| | | | QGTLVTVSS |
| 1859 | I2C_HC_A89L | artificial | QTVVTQEPSLTVSPGGTVTLTCGSSTGAVTSGNYPNWVQQKPGQAPRGLIGGTKFLAP |
| | -VL | | GTPARFSGSLLGGKAALTLSGVQPEDEAEYYCVLWYSNRWVFGGGTKLTVL |
| 1860 | I2C_HC_A89T | artificial | EVQLVESGGGLVQPGGSLKLSCAASGFTFNKYAMNWVRQAPGKGLEWVARIRSKYNNY |
| | -VH | | ATYYADSVKDRFTISRDDSKNTTYLQMNNLKTEDTAVYYCVRHGNFGNSYISYWAYWG |
| | | | QGTLVTVSS |
| 1861 | I2C_HC_A89T | artificial | QTVVTQEPSLTVSPGGTVTLTCGSSTGAVTSGNYPNWVQQKPGQAPRGLIGGTKFLAP |
| | -VL | | GTPARFSGSLLGGKAALTLSGVQPEDEAEYYCVLWYSNRWVFGGGTKLTVL |
| 1862 | I2C_HC_A89V | artificial | EVQLVESGGGLVQPGGSLKLSCAASGFTFNKYAMNWVRQAPGKGLEWVARIRSKYNNY |
| | -VH | | ATYYADSVKDRFTISRDDSKNTVYLQMNNLKTEDTAVYYCVRHGNFGNSYISYWAYWG |
| | | | QGTLVTVSS |
| 1863 | I2C_HC_A89V | artificial | QTVVTQEPSLTVSPGGTVTLTCGSSTGAVTSGNYPNWVQQKPGQAPRGLIGGTKFLAP |
| | -VL | | GTPARFSGSLLGGKAALTLSGVQPEDEAEYYCVLWYSNRWVFGGGTKLTVL |
| 1864 | I2C_HC_L52M | artificial | EVQLVESGGGLVQPGGSLKLSCAASGFTFNKYAMNWVRQAPGKGMEWVARIRSKYNNY |
| | -VH | | ATYYADSVKDRFTISRDDSKNTAYLQMNNLKTEDTAVYYCVRHGNFGNSYISYWAYWG |
| | | | QGTLVTVSS |
| 1865 | I2C_HC_L52M | artificial | QTVVTQEPSLTVSPGGTVTLTCGSSTGAVTSGNYPNWVQQKPGQAPRGLIGGTKFLAP |
| | -VL | | GTPARFSGSLLGGKAALTLSGVQPEDEAEYYCVLWYSNRWVFGGGTKLTVL |
| 1866 | I2C_HC_L52M_ | artificial | EVQLVESGGGLVQPGGSLKLSCAASGFTFNKYAMNWVRQAPGKGMEWVARIRSKYNNY |
| | LC_L21I_ | | ATYYADSVKDRFTISRDDSKNTAYLQMNNLKTEDTAVYYCVRHGNFGNSYISYWAYWG |
| | Q46K_G141S- | | QGTLVTVSS |
| | VH | | |
| 1867 | I2C_HC_L52M_ | artificial | QTVVTQEPSLTVSPGGTVTITCGSSTGAVTSGNYPNWVQKKPGQAPRGLIGGTKFLAP |
| | LC_L21I_ | | GTPARFSGSLLGGKAALTLSGVQPEDEAEYYCVLWYSNRWVFGSGTKLTVL |
| | 6Q4K_G141S- | | |
| | VL | | |
| 1868 | I2C_HC_L52M_ | artificial | EVQLVESGGGLVQPGGSLKLSCAASGFTFNKYAMNWVRQAPGKGMEWVARIRSKYNNY |
| | LC_Q46K- | | ATYYADSVKDRFTISRDDSKNTAYLQMNNLKTEDTAVYYCVRHGNFGNSYISYWAYWG |
| | VH | | QGTLVTVSS |
| 1869 | I2C_HC_L52M_ | artificial | QTVVTQEPSLTVSPGGTVTLTCGSSTGAVTSGNYPNWVQKKPGQAPRGLIGGTKFLAP |
| | LC_Q46K- | | GTPARFSGSLLGGKAALTLSGVQPEDEAEYYCVLWYSNRWVFGGGTKLTVL |
| | VL | | |
| 1870 | I2C_HC_L52M_ | artificial | EVQLVESGGGLVQPGGSLKLSCAASGFTFNKYAMNWVRQAPGKGMEWVARIRSKYNNY |
| | LC_Q46K_ | | ATYYADSVKDRFTISRDDSKNTAYLQMNNLKTEDTAVYYCVRHGNFGNSYISYWAYWG |
| | G141S-VH | | QGTLVTVSS |
| 1871 | I2C_HC_L52M_ | artificial | QTVVTQEPSLTVSPGGTVTLTCGSSTGAVTSGNYPNWVQKKPGQAPRGLIGGTKFLAP |
| | LC_Q46K_ | | GTPARFSGSLLGGKAALTLSGVQPEDEAEYYCVLWYSNRWVFGSGTKLTVL |
| | G141S-VL | | |
| 1872 | I2C_HC_L52V | artificial | EVQLVESGGGLVQPGGSLKLSCAASGFTFNKYAMNWVRQAPGKGVEWVARIRSKYNNY |
| | -VH | | ATYYADSVKDRFTISRDDSKNTAYLQMNNLKTEDTAVYYCVRHGNFGNSYISYWAYWG |
| | | | QGTLVTVSS |
| 1873 | I2C_HC_L52V | artificial | QTVVTQEPSLTVSPGGTVTLTCGSSTGAVTSGNYPNWVQQKPGQAPRGLIGGTKFLAP |
| | -VL | | GTPARFSGSLLGGKAALTLSGVQPEDEAEYYCVLWYSNRWVFGGGTKLTVL |
| 1874 | I2C_HC_L52V_ | artificial | EVQLVESGGGLVQPGGSLKLSCAASGFTFNKYAMNWVRQAPGKGVEWVARIRSKYNNY |
| | LC_V44F- | | ATYYADSVKDRFTISRDDSKNTAYLQMNNLKTEDTAVYYCVRHGNFGNSYISYWAYWG |
| | VH | | QGTLVTVSS |
| 1875 | I2C_HC_L52V_ | artificial | QTVVTQEPSLTVSPGGTVTLTCGSSTGAVTSGNYPNWFQQKPGQAPRGLIGGTKFLAP |
| | LC_V44F- | | GTPARFSGSLLGGKAALTLSGVQPEDEAEYYCVLWYSNRWVFGGGTKLTVL |
| | VL | | |
| 1876 | I2C_HC_L52V_ | artificial | EVQLVESGGGLVQPGGSLKLSCAASGFTFNKYAMNWVRQAPGKGVEWVARIRSKYNNY |
| | LC_V44Y- | | ATYYADSVKDRFTISRDDSKNTAYLQMNNLKTEDTAVYYCVRHGNFGNSYISYWAYWG |
| | VH | | QGTLVTVSS |
| 1877 | I2C_HC_L52V_ | artificial | QTVVTQEPSLTVSPGGTVTLTCGSSTGAVTSGNYPNWYQQKPGQAPRGLIGGTKFLAP |
| | LC_V44Y- | | GTPARFSGSLLGGKAALTLSGVQPEDEAEYYCVLWYSNRWVFGGGTKLTVL |
| | VL | | |
| 1878 | I2C_HC_M41F_ | artificial | KYAFN |
| | A89V-HCDR1 | | |
| 1879 | I2C_HC_M41F_ | artificial | RIRSKYNNYATYYADSVKD |
| | A89V- | | |
| | HCDR2 | | |
| 1880 | I2C_HC_M41F_ | artificial | HGNFGNSYISYWAY |
| | A89V- | | |
| | HCDR3 | | |
| 1881 | I2C_HC_M41F_ | artificial | GSSTGAVTSGNYPN |
| | A89V- | | |
| | LCDR1 | | |
| 1882 | I2C_HC_M41F_ | artificial | GTKFLAP |
| | A89V-LCDR2 | | |
| 1883 | I2C_HC_M41F_ | artificial | VLWYSNRWV |
| | A89V-LCDR3 | | |
| 1884 | I2C_HC_M41F_ | artificial | EVQLVESGGGLVQPGGSLKLSCAASGFTFNKYAFNWVRQAPGKGLEWVARIRSKYNNY |
| | A89V-VH | | ATYYADSVKDRFTISRDDSKNTVYLQMNNLKTEDTAVYYCVRHGNFGNSYISYWAYWG |
| | | | QGTLVTVSS |
| 1885 | I2C_HC_M41F_ | artificial | QTVVTQEPSLTVSPGGTVTLTCGSSTGAVTSGNYPNWVQQKPGQAPRGLIGGTKFLAP |
| | A89V-VL | | GTPARFSGSLLGGKAALTLSGVQPEDEAEYYCVLWYSNRWVFGGGTKLTVL |
| 1886 | I2C_HC_M41I | artificial | KYAIN |
| | -HCDR1 | | |
| 1887 | I2C_HC_M41I | artificial | RIRSKYNNYATYYADSVKD |
| | -HCDR2 | | |
| 1888 | I2C_HC_M41I | artificial | HGNFGNSYISYWAY |
| | -HCDR3 | | |
| 1889 | I2C_HC_M41I | artificial | GSSTGAVTSGNYPN |
| | -LCDR1 | | |
| 1890 | I2C_HC_M41I | artificial | GTKFLAP |
| | -LCDR2 | | |
| 1891 | I2C_HC_M41I | artificial | VLWYSNRWV |
| | -LCDR3 | | |
| 1892 | I2C_HC_M41I | artificial | EVQLVESGGGLVQPGGSLKLSCAASGFTFNKYAINWVRQAPGKGLEWVARIRSKYNNY |
| | -VH | | ATYYADSVKDRFTISRDDSKNTAYLQMNNLKTEDTAVYYCVRHGNFGNSYISYWAYWG |
| | | | QGTLVTVSS |
| 1893 | I2C_HC_M41I | artificial | QTVVTQEPSLTVSPGGTVTLTCGSSTGAVTSGNYPNWVQQKPGQAPRGLIGGTKFLAP |
| | -VL | | GTPARFSGSLLGGKAALTLSGVQPEDEAEYYCVLWYSNRWVFGGGTKLTVL |
| 1894 | I2C_HC_M41I_ | artificial | EVQLVESGGGLVQPGGSLKLSCAASGFTFNKYAINWVRQAPGKGLEWVARIRSKYNNY |
| | A89L-VH | | ATYYADSVKDRFTISRDDSKNTLYLQMNNLKTEDTAVYYCVRHGNFGNSYISYWAYWG |
| | | | QGTLVTVSS |
| 1895 | I2C_HC_M41I_ | artificial | QTVVTQEPSLTVSPGGTVTLTCGSSTGAVTSGNYPNWVQQKPGQAPRGLIGGTKFLAP |
| | A89L-VL | | GTPARFSGSLLGGKAALTLSGVQPEDEAEYYCVLWYSNRWVFGGGTKLTVL |
| 1896 | I2C_HC_M41I_ | artificial | EVQLVESGGGLVQPGGSLKLSCAASGFTFNKYAINWVRQAPGKGLEWVARIRSKYNNY |
| | A89V-VH | | ATYYADSVKDRFTISRDDSKNTVYLQMNNLKTEDTAVYYCVRHGNFGNSYISYWAYWG |
| | | | QGTLVTVSS |
| 1897 | I2C_HC_M41I_ | artificial | QTVVTQEPSLTVSPGGTVTLTCGSSTGAVTSGNYPNWVQQKPGQAPRGLIGGTKFLAP |
| | A89V-VL | | GTPARFSGSLLGGKAALTLSGVQPEDEAEYYCVLWYSNRWVFGGGTKLTVL |
| 1898 | I2C_HC_M41I_ | artificial | EVQLVESGGGLVQPGGSLKLSCAASGFTFNKYAINWVRQAPGKGLEWVARIRSKYNNY |
| | A89V_LC_ | | ATYYADSVKDRFTISRDDSKNTVYLQMNNLKTEDTAVYYCVRHGNFGNSYISYWAYWG |
| | L21I_Q46K_ | | QGTLVTVSS |
| | G141S-VH | | |
| 1899 | I2C_HC_M41I_ | artificial | QTVVTQEPSLTVSPGGTVTITCGSSTGAVTSGNYPNWVQKKPGQAPRGLIGGTKFLAP |
| | A89V_LC_ | | GTPARFSGSLLGGKAALTLSGVQPEDEAEYYCVLWYSNRWVFGSGTKLTVL |
| | L21I_Q46K_ | | |
| | G141S-VL | | |
| 1900 | I2C_HC_M41I_ | artificial | EVQLVESGGGLVQPGGSLKLSCAASGFTFNKYAINWVRQAPGKGLEWVARIRSKYNNY |
| | A89V_LC_ | | ATYYADSVKDRFTISRDDSKNTVYLQMNNLKTEDTAVYYCVRHGNFGNSYISYWAYWG |
| | 6Q4K-VH | | QGTLVTVSS |
| 1901 | I2C_HC_M41I_ | artificial | QTVVTQEPSLTVSPGGTVTLTCGSSTGAVTSGNYPNWVQKKPGQAPRGLIGGTKFLAP |
| | A89V_LC_ | | GTPARFSGSLLGGKAALTLSGVQPEDEAEYYCVLWYSNRWVFGGGTKLTVL |
| | Q46K-VL | | |
| 1902 | I2C_HC_M41I_ | artificial | EVQLVESGGGLVQPGGSLKLSCAASGFTENKYAINWVRQAPGKGVEWVARIRSKYNNY |
| | L52V_A89V_ | | ATYYADSVKDRFTISRDDSKNTVYLQMNNLKTEDTAVYYCVRHGNFGNSYISYWAYWG |
| | LC_L21I_ | | QGTLVTVSS |
| | Q46K_G141S_ | | |
| | V44F-VH | | |
| 1903 | I2C_HC_M41I_ | artificial | QTVVTQEPSLTVSPGGTVTITCGSSTGAVTSGNYPNWFQKKPGQAPRGLIGGTKFLAP |
| | L52V_A89V_ | | GTPARFSGSLLGGKAALTLSGVQPEDEAEYYCVLWYSNRWVFGSGTKLTVL |
| | LC_L21I_ | | |
| | Q46K_G141S_ | | |
| | V44F-VL | | |
| 1904 | I2C_HC_M41I_ | artificial | EVQLVESGGGLVQPGGSLKLSCAASGFTFNKYAINWVRQAPGKGLEWVARIRSKYNNY |
| | LC_L21I_ | | ATYYADSVKDRFTISRDDSKNTAYLQMNNLKTEDTAVYYCVRHGNFGNSYISYWAYWG |
| | Q46K_G141S- | | QGTLVTVSS |
| | VH | | |
| 1905 | I2C_HC_M41I_ | artificial | QTVVTQEPSLTVSPGGTVTITCGSSTGAVTSGNYPNWVQKKPGQAPRGLIGGTKFLAP |
| | LC_L21I_ | | GTPARFSGSLLGGKAALTLSGVQPEDEAEYYCVLWYSNRWVFGSGTKLTVL |
| | Q46K_G141S- | | |
| | VL | | |
| 1906 | I2C_HC_M41I_ | artificial | EVQLVESGGGLVQPGGSLKLSCAASGFTFNKYAINWVREAPGKGLEWVARIRSKYNNY |
| | Q46E_A89V_ | | ATYYADSVKDRFTISRDDSKNTVYLQMNNLKTEDTAVYYCVRHGNFGNSYISYWAYWG |
| | LC_L21I_ | | QGTLVTVSS |
| | Q46K_G141S- | | |
| | VH | | |
| 1907 | I2C_HC_M41I_ | artificial | QTVVTQEPSLTVSPGGTVTITCGSSTGAVTSGNYPNWVQKKPGQAPRGLIGGTKFLAP |
| | Q46E_A89V_ | | GTPARFSGSLLGGKAALTLSGVQPEDEAEYYCVLWYSNRWVFGSGTKLTVL |
| | LC_L21I_ | | |
| | Q46K_G141S- | | |
| | VL | | |
| 1908 | I2C_HC_M41V | artificial | KYAVN |
| | -HCDR1 | | |
| 1909 | I2C_HC_M41V | artificial | RIRSKYNNYATYYADSVKD |
| | -HCDR2 | | |
| 1910 | I2C_HC_M41V | artificial | HGNFGNSYISYWAY |
| | -HCDR3 | | |
| 1911 | I2C_HC_M41V | artificial | GSSTGAVTSGNYPN |
| | -LCDR1 | | |
| 1912 | I2C_HC_M41V | artificial | GTKFLAP |
| | -LCDR2 | | |
| 1913 | I2C_HC_M41V | artificial | VLWYSNRWV |
| | -LCDR3 | | |
| 1914 | I2C_HC_M41V | artificial | EVQLVESGGGLVQPGGSLKLSCAASGFTFNKYAVNWVRQAPGKGLEWVARIRSKYNNY |
| | -VH | | ATYYADSVKDRFTISRDDSKNTAYLQMNNLKTEDTAVYYCVRHGNFGNSYISYWAYWG |
| | | | QGTLVTVSS |
| 1915 | I2C_HC_M41V | artificial | QTVVTQEPSLTVSPGGTVTLTCGSSTGAVTSGNYPNWVQQKPGQAPRGLIGGTKFLAP |
| | -VL | | GTPARFSGSLLGGKAALTLSGVQPEDEAEYYCVLWYSNRWVFGGGTKLTVL |
| 1916 | I2C_HC_Q46D | artificial | EVQLVESGGGLVQPGGSLKLSCAASGFTENKYAMNWVRDAPGKGLEWVARIRSKYNNY |
| | -VH | | ATYYADSVKDRFTISRDDSKNTAYLQMNNLKTEDTAVYYCVRHGNFGNSYISYWAYWG |
| | | | QGTLVTVSS |
| 1917 | I2C_HC_Q46D | artificial | QTVVTQEPSLTVSPGGTVTLTCGSSTGAVTSGNYPNWVQQKPGQAPRGLIGGTKFLAP |
| | -VL | | GTPARFSGSLLGGKAALTLSGVQPEDEAEYYCVLWYSNRWVFGGGTKLTVL |
| 1918 | I2C_HC_Q46D_ | artificial | EVQLVESGGGLVQPGGSLKLSCAASGFTFNKYAMNWVRDAPGKGLEWVARIRSKYNNY |
| | LC_L21I_ | | ATYYADSVKDRFTISRDDSKNTAYLQMNNLKTEDTAVYYCVRHGNFGNSYISYWAYWG |
| | Q46K_G141S- | | QGTLVTVSS |
| | VH | | |
| 1919 | I2C_HC_Q46D_ | artificial | QTVVTQEPSLTVSPGGTVTITCGSSTGAVTSGNYPNWVQKKPGQAPRGLIGGTKFLAP |
| | LC_L21I_ | | GTPARFSGSLLGGKAALTLSGVQPEDEAEYYCVLWYSNRWVFGSGTKLTVL |
| | Q46K_G141S- | | |
| | VL | | |
| 1920 | I2C_HC_Q46D_ | artificial | EVQLVESGGGLVQPGGSLKLSCAASGFTFNKYAMNWVRDAPGKGLEWVARIRSKYNNY |
| | LC_Q46K- | | ATYYADSVKDRFTISRDDSKNTAYLQMNNLKTEDTAVYYCVRHGNFGNSYISYWAYWG |
| | VH | | QGTLVTVSS |
| 1921 | I2C_HC_Q46D_ | artificial | QTVVTQEPSLTVSPGGTVTLTCGSSTGAVTSGNYPNWVQKKPGQAPRGLIGGTKFLAP |
| | LC_Q46K- | | GTPARFSGSLLGGKAALTLSGVQPEDEAEYYCVLWYSNRWVFGGGTKLTVL |
| | VL | | |
| 1922 | I2C_HC_Q46D_ | artificial | EVQLVESGGGLVQPGGSLKLSCAASGFTFNKYAMNWVRDAPGKGLEWVARIRSKYNNY |
| | LC_Q46K_ | | ATYYADSVKDRFTISRDDSKNTAYLQMNNLKTEDTAVYYCVRHGNFGNSYISYWAYWG |
| | 4G11S-VH | | QGTLVTVSS |
| 1923 | I2C_HC_Q46D_ | artificial | QTVVTQEPSLTVSPGGTVTLTCGSSTGAVTSGNYPNWVQKKPGQAPRGLIGGTKFLAP |
| | LC_Q46K_ | | GTPARFSGSLLGGKAALTLSGVQPEDEAEYYCVLWYSNRWVFGSGTKLTVL |
| | G141S-VL | | |
| 1924 | I2C_HC_Q46D_ | artificial | EVQLVESGGGLVQPGGSLKLSCAASGFTENKYAMNWVRDAPGKGLEWVARIRSKYNNY |
| | LC_Q46R- | | ATYYADSVKDRFTISRDDSKNTAYLQMNNLKTEDTAVYYCVRHGNFGNSYISYWAYWG |
| | VH | | QGTLVTVSS |
| 1925 | I2C_HC_Q46D_ | artificial | QTVVTQEPSLTVSPGGTVTLTCGSSTGAVTSGNYPNWVQRKPGQAPRGLIGGTKFLAP |
| | LC_Q46R- | | GTPARFSGSLLGGKAALTLSGVQPEDEAEYYCVLWYSNRWVFGGGTKLTVL |
| | VL | | |
| 1926 | I2C_HC_Q46D_ | artificial | EVQLVESGGGLVQPGGSLKLSCAASGFTENKYAMNWVRDAPGKGLEWVARIRSKYNNY |
| | LC_Q46R_ | | ATYYADSVKDRFTISRDDSKNTAYLQMNNLKTEDTAVYYCVRHGNFGNSYISYWAYWG |
| | G141S-VH | | QGTLVTVSS |
| 1927 | I2C_HC_Q46D_ | artificial | QTVVTQEPSLTVSPGGTVTLTCGSSTGAVTSGNYPNWVQRKPGQAPRGLIGGTKFLAP |
| | LC_Q46R_ | | GTPARFSGSLLGGKAALTLSGVQPEDEAEYYCVLWYSNRWVFGSGTKLTVL |
| | G141S-VL | | |
| 1928 | I2C_HC_Q46D_ | artificial | EVQLVESGGGLVQPGGSLKLSCAASGFTFNKYAMNWVRDAPGKGLEWVARIRSKYNNY |
| | LC_L21I_ | | ATYYADSVKDRFTISRDDSKNTAYLQMNNLKTEDTAVYYCVRHGNFGNSYISYWAYWG |
| | Q46R_G141S- | | QGTLVTVSS |
| | VH | | |
| 1929 | I2C_HC_Q46D_ | artificial | QTVVTQEPSLTVSPGGTVTITCGSSTGAVTSGNYPNWVQRKPGQAPRGLIGGTKFLAP |
| | LC_L21I_ | | GTPARFSGSLLGGKAALTLSGVQPEDEAEYYCVLWYSNRWVFGSGTKLTVL |
| | Q46R_G141S- | | |
| | VL | | |
| 1930 | I2C_HC_Q46E | artificial | EVQLVESGGGLVQPGGSLKLSCAASGFTENKYAMNWVREAPGKGLEWVARIRSKYNNY |
| | -VH | | ATYYADSVKDRFTISRDDSKNTAYLQMNNLKTEDTAVYYCVRHGNFGNSYISYWAYWG |
| | | | QGTLVTVSS |
| 1931 | I2C_HC_Q46E | artificial | QTVVTQEPSLTVSPGGTVTLTCGSSTGAVTSGNYPNWVQQKPGQAPRGLIGGTKFLAP |
| | -VL | | GTPARFSGSLLGGKAALTLSGVQPEDEAEYYCVLWYSNRWVFGGGTKLTVL |
| 1932 | I2C_HC_Q46E_ | artificial | EVQLVESGGGLVQPGGSLKLSCAASGFTFNKYAMNWVREAPGKGLEWVARIRSKYNNY |
| | LC_L21I_ | | ATYYADSVKDRFTISRDDSKNTAYLQMNNLKTEDTAVYYCVRHGNFGNSYISYWAYWG |
| | Q46K_G141S- | | QGTLVTVSS |
| | VH | | |
| 1933 | I2C_HC_Q46E_ | artificial | QTVVTQEPSLTVSPGGTVTITCGSSTGAVTSGNYPNWVQKKPGQAPRGLIGGTKFLAP |
| | LC_L21I_ | | GTPARFSGSLLGGKAALTLSGVQPEDEAEYYCVLWYSNRWVFGSGTKLTVL |
| | Q46K_G141S- | | |
| | VL | | |
| 1934 | I2C_HC_Q46E_ | artificial | EVQLVESGGGLVQPGGSLKLSCAASGFTFNKYAMNWVREAPGKGLEWVARIRSKYNNY |
| | LC_L21I_ | | ATYYADSVKDRFTISRDDSKNTAYLQMNNLKTEDTAVYYCVRHGNFGNSYISYWAYWG |
| | Q46R_G141S- | | QGTLVTVSS |
| | VH | | |
| 1935 | I2C_HC_Q46E_ | artificial | QTVVTQEPSLTVSPGGTVTITCGSSTGAVTSGNYPNWVQRKPGQAPRGLIGGTKFLAP |
| | LC_L21I_ | | GTPARFSGSLLGGKAALTLSGVQPEDEAEYYCVLWYSNRWVFGSGTKLTVL |
| | Q46R_G141S- | | |
| | VL | | |
| 1936 | I2C_HC_Q46E_ | artificial | EVQLVESGGGLVQPGGSLKLSCAASGFTFNKYAMNWVREAPGKGLEWVARIRSKYNNY |
| | LC_Q46K- | | ATYYADSVKDRFTISRDDSKNTAYLQMNNLKTEDTAVYYCVRHGNFGNSYISYWAYWG |
| | VH | | QGTLVTVSS |
| 1937 | I2C_HC_Q46E_ | artificial | QTVVTQEPSLTVSPGGTVTLTCGSSTGAVTSGNYPNWVQKKPGQAPRGLIGGTKFLAP |
| | LC_Q46K- | | GTPARFSGSLLGGKAALTLSGVQPEDEAEYYCVLWYSNRWVFGGGTKLTVL |
| | VL | | |
| 1938 | I2C_HC_Q46E_ | artificial | EVQLVESGGGLVQPGGSLKLSCAASGFTENKYAMNWVREAPGKGLEWVARIRSKYNNY |
| | LC_Q46K_ | | ATYYADSVKDRFTISRDDSKNTAYLQMNNLKTEDTAVYYCVRHGNFGNSYISYWAYWG |
| | G141S-VH | | QGTLVTVSS |
| 1939 | I2C_HC_Q46E_ | artificial | QTVVTQEPSLTVSPGGTVTLTCGSSTGAVTSGNYPNWVQKKPGQAPRGLIGGTKFLAP |
| | LC_Q46K_ | | GTPARFSGSLLGGKAALTLSGVQPEDEAEYYCVLWYSNRWVFGSGTKLTVL |
| | G141S-VL | | |
| 1940 | I2C_HC_Q46E_ | artificial | EVQLVESGGGLVQPGGSLKLSCAASGFTENKYAMNWVREAPGKGLEWVARIRSKYNNY |
| | LC_Q46R- | | ATYYADSVKDRFTISRDDSKNTAYLQMNNLKTEDTAVYYCVRHGNFGNSYISYWAYWG |
| | VH | | QGTLVTVSS |
| 1941 | I2C_HC_Q46E_ | artificial | QTVVTQEPSLTVSPGGTVTLTCGSSTGAVTSGNYPNWVQRKPGQAPRGLIGGTKFLAP |
| | LC_Q46R- | | GTPARFSGSLLGGKAALTLSGVQPEDEAEYYCVLWYSNRWVFGGGTKLTVL |
| | VL | | |
| 1942 | I2C_HC_Q46E_ | artificial | EVQLVESGGGLVQPGGSLKLSCAASGFTFNKYAMNWVREAPGKGLEWVARIRSKYNNY |
| | LC_Q46R_ | | ATYYADSVKDRFTISRDDSKNTAYLQMNNLKTEDTAVYYCVRHGNFGNSYISYWAYWG |
| | G141S-VH | | QGTLVTVSS |
| 1943 | I2C_HC_Q46E_ | artificial | QTVVTQEPSLTVSPGGTVTLTCGSSTGAVTSGNYPNWVQRKPGQAPRGLIGGTKFLAP |
| | LC_Q46R_ | | GTPARFSGSLLGGKAALTLSGVQPEDEAEYYCVLWYSNRWVFGSGTKLTVL |
| | G141S-VL | | |
| 1944 | I2C_HC_Q46K | artificial | EVQLVESGGGLVQPGGSLKLSCAASGFTFNKYAMNWVRKAPGKGLEWVARIRSKYNNY |
| | -VH | | ATYYADSVKDRFTISRDDSKNTAYLQMNNLKTEDTAVYYCVRHGNFGNSYISYWAYWG |
| | | | QGTLVTVSS |
| 1945 | I2C_HC_Q46K | artificial | QTVVTQEPSLTVSPGGTVTLTCGSSTGAVTSGNYPNWVQQKPGQAPRGLIGGTKFLAP |
| | -VL | | GTPARFSGSLLGGKAALTLSGVQPEDEAEYYCVLWYSNRWVFGGGTKLTVL |
| 1946 | I2C_HC_Q46R | artificial | EVQLVESGGGLVQPGGSLKLSCAASGFTFNKYAMNWVRRAPGKGLEWVARIRSKYNNY |
| | -VH | | ATYYADSVKDRFTISRDDSKNTAYLQMNNLKTEDTAVYYCVRHGNFGNSYISYWAYWG |
| | | | QGTLVTVSS |
| 1947 | I2C_HC_Q46R | artificial | QTVVTQEPSLTVSPGGTVTLTCGSSTGAVTSGNYPNWVQQKPGQAPRGLIGGTKFLAP |
| | -VL | | GTPARFSGSLLGGKAALTLSGVQPEDEAEYYCVLWYSNRWVFGGGTKLTVL |
| 1948 | I2C_HC_V107A- | artificial | EVQLVESGGGLVQPGGSLKLSCAASGFTFNKYAMNWVRQAPGKGLEWVARIRSKYNNY |
| | VH | | ATYYADSVKDRFTISRDDSKNTAYLQMNNLKTEDTAVYYCARHGNFGNSYISYWAYWG |
| | | | QGTLVTVSS |
| 1949 | I2C_HC_V107A- | artificial | QTVVTQEPSLTVSPGGTVTLTCGSSTGAVTSGNYPNWVQQKPGQAPRGLIGGTKFLAP |
| | VL | | GTPARFSGSLLGGKAALTLSGVQPEDEAEYYCVLWYSNRWVFGGGTKLTVL |
| 1950 | I2C_HC_V107L- | artificial | EVQLVESGGGLVQPGGSLKLSCAASGFTFNKYAMNWVRQAPGKGLEWVARIRSKYNNY |
| | VH | | ATYYADSVKDRFTISRDDSKNTAYLQMNNLKTEDTAVYYCLRHGNFGNSYISYWAYWG |
| | | | QGTLVTVSS |
| 1951 | I2C_HC_V107L- | artificial | QTVVTQEPSLTVSPGGTVTLTCGSSTGAVTSGNYPNWVQQKPGQAPRGLIGGTKFLAP |
| | VL | | GTPARFSGSLLGGKAALTLSGVQPEDEAEYYCVLWYSNRWVFGGGTKLTVL |
| 1952 | I2C_HC_W136F- | artificial | KYAMN |
| | HCDR1 | | |
| 1953 | I2C_HC_W136F- | artificial | RIRSKYNNYATYYADSVKD |
| | HCDR2 | | |
| 1954 | I2C_HC_W136F- | artificial | HGNFGNSYISYFAY |
| | HCDR3 | | |
| 1955 | I2C_HC_W136F- | artificial | GSSTGAVTSGNYPN |
| | LCDR1 | | |
| 1956 | I2C_HC_W136F- | artificial | GTKFLAP |
| | LCDR2 | | |
| 1957 | I2C_HC_W136F- | artificial | VLWYSNRWV |
| | LCDR3 | | |
| 1958 | I2C_HC_W136F- | artificial | EVQLVESGGGLVQPGGSLKLSCAASGFTFNKYAMNWVRQAPGKGLEWVARIRSKYNNY |
| | VH | | ATYYADSVKDRFTISRDDSKNTAYLQMNNLKTEDTAVYYCVRHGNFGNSYISYFAYWG |
| | | | QGTLVTVSS |
| 1959 | I2C_HC_W136F- | artificial | QTVVTQEPSLTVSPGGTVTLTCGSSTGAVTSGNYPNWVQQKPGQAPRGLIGGTKFLAP |
| | VL | | GTPARFSGSLLGGKAALTLSGVQPEDEAEYYCVLWYSNRWVFGGGTKLTVL |
| 1960 | I2C_HC_W136F_ | artificial | EVQLVESGGGLVQPGGSLKLSCAASGFTFNKYAMNWVRQAPGKGLEWVARIRSKYNNY |
| | LC_V44I- | | ATYYADSVKDRFTISRDDSKNTAYLQMNNLKTEDTAVYYCVRHGNFGNSYISYFAYWG |
| | VH | | QGTLVTVSS |
| 1961 | I2C_HC_W136F_ | artificial | QTVVTQEPSLTVSPGGTVTLTCGSSTGAVTSGNYPNWIQQKPGQAPRGLIGGTKFLAP |
| | LC_V44I- | | GTPARFSGSLLGGKAALTLSGVQPEDEAEYYCVLWYSNRWVFGGGTKLTVL |
| | VL | | |
| 1962 | I2C_HC_W136F_ | artificial | EVQLVESGGGLVQPGGSLKLSCAASGFTFNKYAMNWVRQAPGKGLEWVARIRSKYNNY |
| | LC_V44L- | | ATYYADSVKDRFTISRDDSKNTAYLQMNNLKTEDTAVYYCVRHGNFGNSYISYFAYWG |
| | VH | | QGTLVTVSS |
| 1963 | I2C_HC_W136F_ | artificial | QTVVTQEPSLTVSPGGTVTLTCGSSTGAVTSGNYPNWLQQKPGQAPRGLIGGTKFLAP |
| | LC_V44L- | | GTPARFSGSLLGGKAALTLSGVQPEDEAEYYCVLWYSNRWVFGGGTKLTVL |
| | VL | | |
| 1964 | I2C_LC_G141S- | artificial | EVQLVESGGGLVQPGGSLKLSCAASGFTFNKYAMNWVRQAPGKGLEWVARIRSKYNNY |
| | VH | | ATYYADSVKDRFTISRDDSKNTAYLQMNNLKTEDTAVYYCVRHGNFGNSYISYWAYWG |
| | | | QGTLVTVSS |
| 1965 | I2C_LC_G141S- | artificial | QTVVTQEPSLTVSPGGTVTLTCGSSTGAVTSGNYPNWVQQKPGQAPRGLIGGTKFLAP |
| | VL | | GTPARFSGSLLGGKAALTLSGVQPEDEAEYYCVLWYSNRWVFGSGTKLTVL |
| 1966 | I2C_LC_G141S_ | artificial | EVQLVESGGGLVQPGGSLKLSCAASGFTFNKYAMNWVRQAPGKGLEWVARIRSKYNNY |
| | L21I-VH | | ATYYADSVKDRFTISRDDSKNTAYLQMNNLKTEDTAVYYCVRHGNFGNSYISYWAYWG |
| | | | QGTLVTVSS |
| 1967 | I2C_LC_G141S_ | artificial | QTVVTQEPSLTVSPGGTVTITCGSSTGAVTSGNYPNWVQQKPGQAPRGLIGGTKFLAP |
| | L21I-VL | | GTPARFSGSLLGGKAALTLSGVQPEDEAEYYCVLWYSNRWVFGSGTKLTVL |
| 1968 | I2C_LC_L83E | artificial | EVQLVESGGGLVQPGGSLKLSCAASGFTFNKYAMNWVRQAPGKGLEWVARIRSKYNNY |
| | -VH | | ATYYADSVKDRFTISRDDSKNTAYLQMNNLKTEDTAVYYCVRHGNFGNSYISYWAYWG |
| | | | QGTLVTVSS |
| 1969 | I2C_LC_L83E | artificial | QTVVTQEPSLTVSPGGTVTLTCGSSTGAVTSGNYPNWVQQKPGQAPRGLIGGTKFLAP |
| | -VL | | GTPARFSGSLEGGKAALTLSGVQPEDEAEYYCVLWYSNRWVFGGGTKLTVL |
| 1970 | I2C_LC_L83S | artificial | EVQLVESGGGLVQPGGSLKLSCAASGFTFNKYAMNWVRQAPGKGLEWVARIRSKYNNY |
| | -VH | | ATYYADSVKDRFTISRDDSKNTAYLQMNNLKTEDTAVYYCVRHGNFGNSYISYWAYWG |
| | | | QGTLVTVSS |
| 1971 | I2C_LC_L83S | artificial | QTVVTQEPSLTVSPGGTVTLTCGSSTGAVTSGNYPNWVQQKPGQAPRGLIGGTKFLAP |
| | -VL | | GTPARFSGSLSGGKAALTLSGVQPEDEAEYYCVLWYSNRWVFGGGTKLTVL |
| 1972 | I2C_LC_Q46E | artificial | EVQLVESGGGLVQPGGSLKLSCAASGFTFNKYAMNWVRQAPGKGLEWVARIRSKYNNY |
| | -VH | | ATYYADSVKDRFTISRDDSKNTAYLQMNNLKTEDTAVYYCVRHGNFGNSYISYWAYWG |
| | | | QGTLVTVSS |
| 1973 | I2C_LC_Q46E | artificial | QTVVTQEPSLTVSPGGTVTLTCGSSTGAVTSGNYPNWVQEKPGQAPRGLIGGTKFLAP |
| | -VL | | GTPARFSGSLLGGKAALTLSGVQPEDEAEYYCVLWYSNRWVFGGGTKLTVL |
| 1974 | I2C_LC_Q46K | artificial | EVQLVESGGGLVQPGGSLKLSCAASGFTFNKYAMNWVRQAPGKGLEWVARIRSKYNNY |
| | -VH | | ATYYADSVKDRFTISRDDSKNTAYLQMNNLKTEDTAVYYCVRHGNFGNSYISYWAYWG |
| | | | QGTLVTVSS |
| 1975 | I2C_LC_Q46K | artificial | QTVVTQEPSLTVSPGGTVTLTCGSSTGAVTSGNYPNWVQKKPGQAPRGLIGGTKFLAP |
| | -VL | | GTPARFSGSLLGGKAALTLSGVQPEDEAEYYCVLWYSNRWVFGGGTKLTVL |
| 1976 | I2C_LC_V107A- | artificial | KYAMN |
| | HCDR1 | | |
| 1977 | I2C_LC_V107A- | artificial | RIRSKYNNYATYYADSVKD |
| | HCDR2 | | |
| 1978 | I2C_LC_V107A- | artificial | HGNFGNSYISYWAY |
| | HCDR3 | | |
| 1979 | I2C_LC_V107A- | artificial | GSSTGAVTSGNYPN |
| | LCDR1 | | |
| 1980 | I2C_LC_V107A- | artificial | GTKFLAP |
| | LCDR2 | | |
| 1981 | I2C_LC_V107A- | artificial | ALWYSNRWV |
| | LCDR3 | | |
| 1982 | I2C_LC_V107A- | artificial | EVQLVESGGGLVQPGGSLKLSCAASGFTFNKYAMNWVRQAPGKGLEWVARIRSKYNNY |
| | VH | | ATYYADSVKDRFTISRDDSKNTAYLQMNNLKTEDTAVYYCVRHGNFGNSYISYWAYWG |
| | | | QGTLVTVSS |
| 1983 | I2C_LC_V107A- | artificial | QTVVTQEPSLTVSPGGTVTLTCGSSTGAVTSGNYPNWVQQKPGQAPRGLIGGTKFLAP |
| | VL | | GTPARFSGSLLGGKAALTLSGVQPEDEAEYYCALWYSNRWVFGGGTKLTVL |
| 1984 | I2C_LC_V107L- | artificial | KYAMN |
| | HCDR1 | | |
| 1985 | I2C_LC_V107L- | artificial | RIRSKYNNYATYYADSVKD |
| | HCDR2 | | |
| 1986 | I2C_LC_V107L- | artificial | HGNFGNSYISYWAY |
| | HCDR3 | | |
| 1987 | I2C_LC_V107L- | artificial | GSSTGAVTSGNYPN |
| | LCDR1 | | |
| 1988 | I2C_LC_V107L- | artificial | GTKFLAP |
| | LCDR2 | | |
| 1989 | I2C_LC_V107L- | artificial | LLWYSNRWV |
| | LCDR3 | | |
| 1990 | I2C_LC_V107L- | artificial | EVQLVESGGGLVQPGGSLKLSCAASGFTFNKYAMNWVRQAPGKGLEWVARIRSKYNNY |
| | VH | | ATYYADSVKDRFTISRDDSKNTAYLQMNNLKTEDTAVYYCVRHGNFGNSYISYWAYWG |
| | | | QGTLVTVSS |
| 1991 | I2C_LC_V107L- | artificial | QTVVTQEPSLTVSPGGTVTLTCGSSTGAVTSGNYPNWVQQKPGQAPRGLIGGTKFLAP |
| | VL | | GTPARFSGSLLGGKAALTLSGVQPEDEAEYYCLLWYSNRWVFGGGTKLTVL |
| 1992 | I2C_LC_V44I | artificial | EVQLVESGGGLVQPGGSLKLSCAASGFTFNKYAMNWVRQAPGKGLEWVARIRSKYNNY |
| | -VH | | ATYYADSVKDRFTISRDDSKNTAYLQMNNLKTEDTAVYYCVRHGNFGNSYISYWAYWG |
| | | | QGTLVTVSS |
| 1993 | I2C_LC_V44I | artificial | QTVVTQEPSLTVSPGGTVTLTCGSSTGAVTSGNYPNWIQQKPGQAPRGLIGGTKFLAP |
| | -VL | | GTPARFSGSLLGGKAALTLSGVQPEDEAEYYCVLWYSNRWVFGGGTKLTVL |
| 1994 | I2C_LC_V44L | artificial | EVQLVESGGGLVQPGGSLKLSCAASGFTENKYAMNWVRQAPGKGLEWVARIRSKYNNY |
| | -VH | | ATYYADSVKDRFTISRDDSKNTAYLQMNNLKTEDTAVYYCVRHGNFGNSYISYWAYWG |
| | | | QGTLVTVSS |
| 1995 | I2C_LC_V44L | artificial | QTVVTQEPSLTVSPGGTVTLTCGSSTGAVTSGNYPNWLQQKPGQAPRGLIGGTKFLAP |
| | -VL | | GTPARFSGSLLGGKAALTLSGVQPEDEAEYYCVLWYSNRWVFGGGTKLTVL |
| 1996 | I2C_LC_V44M | artificial | EVQLVESGGGLVQPGGSLKLSCAASGFTFNKYAMNWVRQAPGKGLEWVARIRSKYNNY |
| | -VH | | ATYYADSVKDRFTISRDDSKNTAYLQMNNLKTEDTAVYYCVRHGNFGNSYISYWAYWG |
| | | | QGTLVTVSS |
| 1997 | I2C_LC_V44M | artificial | QTVVTQEPSLTVSPGGTVTLTCGSSTGAVTSGNYPNWMQQKPGQAPRGLIGGTKFLAP |
| | -VL | | GTPARFSGSLLGGKAALTLSGVQPEDEAEYYCVLWYSNRWVFGGGTKLTVL |
| 1998 | I2C_LC_W109Y- | artificial | KYAMN |
| | HCDR1 | | |
| 1999 | I2C_LC_W109Y- | artificial | RIRSKYNNYATYYADSVKD |
| | HCDR2 | | |
| 2000 | I2C_LC_W109Y- | artificial | HGNFGNSYISYWAY |
| | HCDR3 | | |
| 2001 | I2C_LC_W109Y- | artificial | GSSTGAVTSGNYPN |
| | LCDR1 | | |
| 2002 | I2C_LC_W109Y- | artificial | GTKFLAP |
| | LCDR2 | | |
| 2003 | I2C_LC_W109Y- | artificial | VLYYSNRWV |
| | LCDR3 | | |
| 2004 | I2C_LC_W109Y- | artificial | EVQLVESGGGLVQPGGSLKLSCAASGFTFNKYAMNWVRQAPGKGLEWVARIRSKYNNY |
| | VH | | ATYYADSVKDRFTISRDDSKNTAYLQMNNLKTEDTAVYYCVRHGNFGNSYISYWAYWG |
| | | | QGTLVTVSS |
| 2005 | I2C_LC_W109Y- | artificial | QTVVTQEPSLTVSPGGTVTLTCGSSTGAVTSGNYPNWVQQKPGQAPRGLIGGTKFLAP |
| | VL | | GTPARFSGSLLGGKAALTLSGVQPEDEAEYYCVLYYSNRWVFGGGTKLTVL |
| 2006 | I2E-HCDR1 | artificial | KYAIN |
| 2007 | I2E-HCDR2 | artificial | RIRSKYNNYATYYADAVKD |
| 2008 | I2E-HCDR3 | artificial | AGNFGSSYISYWAY |
| 2009 | I2E-LCDR1 | artificial | GSSTGAVTSGNYPN |
| 2010 | I2E-LCDR2 | artificial | GTKFLAP |
| 2011 | I2E-LCDR3 | artificial | VLWYSNRWV |
| 2012 | I2E-VH | artificial | EVQLVESGGGLVQPGGSLKLSCAASGFTFNKYAINWVRQAPGKGLEWVARIRSKYNNY |
| | | | ATYYADAVKDRFTISRDDSKNTVYLQMNNLKTEDTAVYYCARAGNFGSSYISYWAYWG |
| | | | QGTLVTVSS |
| 2013 | I2E-VL | artificial | QTVVTQEPSLTVSPGGTVTITCGSSTGAVTSGNYPNWVQKKPGQAPRGLIGGTKFLAP |
| | | | GTPARFSGSLSGGKAALTLSGVQPEDEAEYYCVLWYSNRWVFGSGTKLTVL |
| 2014 | I2K-HCDR1 | artificial | KYAMN |
| 2015 | I2K-HCDR2 | artificial | RIRSKYNNYATYYAEAVKG |
| 2016 | I2K-HCDR3 | artificial | NENIGTSYISYWAY |
| 2017 | I2K-LCDR1 | artificial | GSSTGAVTSGNYPN |
| 2018 | I2K-LCDR2 | artificial | GTKFLAP |
| 2019 | I2K-LCDR3 | artificial | VLWYSNRWV |
| 2020 | I2K-VH | artificial | EVQLVESGGGLVQPGGSLKLSCAASGFTFNKYAMNWVRQAPGKGLEWVARIRSKYNNY |
| | | | ATYYAEAVKGRFTISRDDSKNTVYLQMNNLKTEDTAVYYCVRNENIGTSYISYWAYWG |
| | | | QGTLVTVSS |
| 2021 | I2K-VL | artificial | QTVVTQEPSLTVSPGGTVTITCGSSTGAVTSGNYPNWVQQKPGQAPRGLIGGTKFLAP |
| | | | GTPARFSGSLSGGKAALTLSGVQPEDEAEYYCVLWYSNRWVFGSGTKLTVL |
| 2022 | I2L-HCDR1 | artificial | KYAMN |
| 2023 | I2L-HCDR2 | artificial | RIRSKYNNYATYYADAVKD |
| 2024 | I2L-HCDR3 | artificial | AGNFGSSYISYFAY |
| 2025 | I2L-LCDR1 | artificial | GSSTGAVTSGNYPN |
| 2026 | I2L-LCDR2 | artificial | GTKFLAP |
| 2027 | I2L-LCDR3 | artificial | VLYYSNRWV |
| 2028 | I2L-VH | artificial | EVQLVESGGGLVQPGGSLKLSCAASGFTFNKYAMNWVRQAPGKGMEWVARIRSKYNNY |
| | | | ATYYADAVKDRFTISRDDSKNTLYLQMNNLKTEDTAVYYCVRAGNFGSSYISYFAYWG |
| | | | QGTLVTVSS |
| 2029 | I2L-VL | artificial | QTVVTQEPSLTVSPGGTVTITCGSSTGAVTSGNYPNWIQKKPGQAPRGLIGGTKFLAP |
| | | | GTPARFSGSLEGGKAALTLSGVQPEDEAEYYCVLYYSNRWVFGSGTKLTVL |
| 2030 | I2M-HCDR1 | artificial | KYAMN |
| 2031 | I2M-HCDR2 | artificial | RIRSKYNNYATYYADAVKD |
| 2032 | I2M-HCDR3 | artificial | AGNFGTSYISYWAY |
| 2033 | I2M-LCDR1 | artificial | GSSTGAVTSGNYPN |
| 2034 | I2M-LCDR2 | artificial | GTKFLAP |
| 2035 | I2M-LCDR3 | artificial | VLWYSNRWV |
| 2036 | I2M-VH | artificial | EVQLVESGGGLVQPGGSLKLSCAASGFTFNKYAMNWVRQAPGKGMEWVARIRSKYNNY |
| | | | ATYYADAVKDRFTISRDDSKNTLYLQMNNLKTEDTAVYYCVRAGNFGTSYISYWAYWG |
| | | | QGTLVTVSS |
| 2037 | I2M-VL | artificial | QTVVTQEPSLTVSPGGTVTITCGSSTGAVTSGNYPNWVQKKPGQAPRGLIGGTKFLAP |
| | | | GTPARFSGSLSGGKAALTLSGVQPEDEAEYYCVLWYSNRWVFGSGTKLTVL |
| 2038 | I2M2- | artificial | KYAIN |
| | HCDR1 | | |
| 2039 | I2M2- | artificial | RIRSKYNNYATYYADAVKD |
| | HCDR2 | | |
| 2040 | I2M2- | artificial | NANFGTSYISYFAY |
| | HCDR3 | | |
| 2041 | I2M2- | artificial | GSSTGAVTSGNYPN |
| | LCDR1 | | |
| 2042 | I2M2- | artificial | GTKFLAP |
| | LCDR2 | | |
| 2043 | I2M2- | artificial | VLWYSNRWV |
| | LCDR3 | | |
| 2044 | I2M2-VH | artificial | EVQLVESGGGLVQPGGSLKLSCAASGFTFNKYAINWVREAPGKGLEWVARIRSKYNNY |
| | | | ATYYADAVKDRFTISRDDSKNTAYLQMNNLKTEDTAVYYCVRNANFGTSYISYFAYWG |
| | | | QGTLVTVSS |
| 2045 | I2M2-VL | artificial | QTVVTQEPSLTVSPGGTVTLTCGSSTGAVTSGNYPNWVQKKPGQAPRGLIGGTKFLAP |
| | | | GTPARFSGSLLGGKAALTLSGVQPEDEAEYYCVLWYSNRWVFGSGTKLTVL |
| 2046 | consensus_ | artificial | KYAMN |
| | sequence_1- | | |
| | HCDR1 | | |
| 2047 | consensus_ | artificial | RIRSKYNNYATYYADSVKD |
| | sequence_1- | | |
| | HCDR2 | | |
| 2048 | consensus_ | artificial | HGNFGNSYJSXWAY |
| | sequence_1- | | |
| | HCDR3 | | |
| 2049 | consensus_ | artificial | GSSTGAVTSGYYPN |
| | sequence_1- | | |
| | LCDR1 | | |
| 2050 | consensus_ | artificial | GTKFLAP |
| | sequence_1- | | |
| | LCDR2 | | |
| 2051 | consensus_ | artificial | ALWYSNRWV |
| | sequence_1- | | |
| | LCDR3 | | |
| 2052 | consensus_ | artificial | EVQLVESGGGLVQPGGSLKLSCAASGFTFNKYAMNWVRQAPGKGLEWVARIRSKYNNY |
| | sequence_1- | | ATYYADSVKDRFTISRDDSKNTAYLQMNNLKTEDTAVYYCVRHGNFGNSYJSXWAYWG |
| | VH | | QGTLVTVSS |
| 2053 | consensus_ | artificial | QTVVTQEPSLTVSPGGTVTLTCGSSTGAVTSGYYPNWVQQKPGQAPRGLIGGTKFLAP |
| | sequence_1- | | GTPARFSGSLLGGKAALTLSGVQPEDEAEYYCALWYSNRWVFGGGTKLTVL |
| | VL | | |
| 2054 | consensus_ | artificial | KYAMN |
| | sequence_2 | | |
| | HCDR1 | | |
| 2055 | consensus_ | artificial | RIRSKYNNYATYYADSVKX |
| | sequence_2 | | |
| | HCDR2 | | |
| 2056 | consensus_ | artificial | HGNFGNSYJSYWAY |
| | sequence_2 | | |
| | HCDR3 | | |
| 2057 | consensus_ | artificial | GSSTGAVTSGYYPN |
| | sequence_2 | | |
| | LCDR1 | | |
| 2058 | consensus_ | artificial | GTKFLAP |
| | sequence_2 | | |
| | LCDR2 | | |
| 2059 | consensus_ | artificial | ALWYSNRWV |
| | sequence_2 | | |
| | LCDR3 | | |
| 2060 | consensus_ | artificial | EVQLVESGGGLVQPGGSLKLSCAASGFTFNKYAMNWVRQAPGKGLEWVARIRSKYNNY |
| | sequence_2 | | ATYYADSVKXRFTISRDDSKNTAYLQMNNLKTEDTAVYYCVRHGNFGNSYJSYWAYWG |
| | VH | | QGTLVTVSS |
| 2061 | consensus_ | artificial | QTVVTQEPSLTVSPGGTVTLTCGSSTGAVTSGYYPNWVQQKPGQAPRGLIGGTKFLAP |
| | sequence_2 | | GTPARFSGSLLGGKAALTLSGVQPEDEAEYYCALWYSNRWVFGGGTKLTVL |
| | VL | | |
| 2062 | consensus_ | artificial | KYAMN |
| | sequence_3- | | |
| | HCDR1 | | |
| 2063 | consensus_ | artificial | RIRSKYNNYATYYADSVKX |
| | sequence_3- | | |
| | HCDR2 | | |
| 2064 | consensus_ | artificial | HGNFGNSYISYWAY |
| | sequence_3- | | |
| | HCDR3 | | |
| 2065 | consensus_ | artificial | GSSTGAVTSGYYPN |
| | sequence_3- | | |
| | LCDR1 | | |
| 2066 | consensus_ | artificial | GTKFLAP |
| | sequence_3- | | |
| | LCDR2 | | |
| 2067 | consensus_ | artificial | ALWYSNRWV |
| | sequence_3- | | |
| | LCDR3 | | |
| 2068 | consensus_ | artificial | EVQLVESGGGLVQPGGSLKLSCAASGFTFNKYAMNWVRQAPGKGLEWVARIRSKYNNY |
| | sequence_3- | | ATYYADSVKXRFTISRDDSKNTAYLQMNNLKTEDTAVYYCVRHGNFGNSYISYWAYWG |
| | VH | | QGTLVTVSS |
| 2069 | consensus_ | artificial | QTVVTQEPSLTVSPGGTVTLTCGSSTGAVTSGYYPNWVQQKPGQAPRGLIGGTKFLAP |
| | sequence_3- | | GTPARFSGSLLGGKAALTLSGVQPEDEAEYYCALWYSNRWVFGGGTKLTVL |
| | VL | | |
| 2070 | consensus_ | artificial | EVQLVESGGGLVQPGGSLKLSCAASGFTFNKYAMNWVRQAPGKGLEWVARIRSKYNNY |
| | sequence_4- | | ATYYADSVKDRFTISRDDSKNTAYLQMNNLKTEDTAVYYCVRHGNFGNSYISYWAYWG |
| | VH | | QGTLVTVSS |
| 2071 | consensus_ | artificial | QTVVTQEPSLTVSPGGTVTLTCGSSTGAVTSGNYPNWVQQKPGQAPRGLIGGTKFLAP |
| | sequence_4- | | GTPARFSGSLLGGKAALTLSGVQPEDEAEYYCVLWYSNRWVFGGGTKLTVL |
| | VL | | |
| 2072 | BC A7 27- | artificial | NHIIH |
| | C4-G7- | | |
| | HCDR1 | | |
| 2073 | BC A7 27- | artificial | YINPYPGYHAYNEKFQG |
| | C4-G7- | | |
| | HCDR2 | | |
| 2074 | BC A7 27- | artificial | DGYYRDTDVLDY |
| | C4-G7- | | |
| | HCDR3 | | |
| 2075 | BC A7 27- | artificial | QASQDISNYLN |
| | C4-G7- | | |
| | LCDR1 | | |
| 2076 | BC A7 27- | artificial | YTSRLHT |
| | C4-G7- | | |
| | LCDR2 | | |
| 2077 | BC A7 27- | artificial | QQGNTLPWT |
| | C4-G7- | | |
| | LCDR3 | | |
| 2078 | BC A7 27- | artificial | QVQLVQSGAEVKKPGASVKVSCKASGYTFTNHIIHWVRQAPGQGLEWMGYINPYPGYH |
| | C4-G7-VH | | AYNEKFQGRATMTSDTSTSTVYMELSSLRSEDTAVYYCARDGYYRDTDVLDYWGQGTL |
| | | | VTVSS |
| 2079 | BC A7 27- | artificial | DIQMTQSPSSLSASVGDRVTITCQASQDISNYLNWYQQKPGKAPKLLIYYTSRLHTGV |
| | C4-G7-VL | | PSRFSGSGSGTDFTFTISSLEPEDIATYYCQQGNTLPWTFGQGTKVEIK |
| 2080 | BC A7 27- | artificial | QVQLVQSGAEVKKPGASVKVSCKASGYTFTNHIIHWVRQAPGQCLEWMGYINPYPGYH |
| | C4-G7 CC- | | AYNEKFQGRATMTSDTSTSTVYMELSSLRSEDTAVYYCARDGYYRDTDVLDYWGQGTL |
| | VH | | VTVSS |
| 2081 | BC A7 27- | artificial | DIQMTQSPSSLSASVGDRVTITCQASQDISNYLNWYQQKPGKAPKLLIYYTSRLHTGV |
| | C4-G7 CC- | | PSRFSGSGSGTDFTFTISSLEPEDIATYYCQQGNTLPWTFGCGTKVEIK |
| | VL | | |
| 2082 | BC A7 27- | artificial | EIQMTQSPSSLSASVGDRVTITCQASQDISNYLNWYQQKPGKAPKLLIYYTSRLHTGV |
| | C4-G7 CC EI | | PSRFSGSGSGTDFTFTISSLEPEDIATYYCQQGNTLPWTFGCGTKVEIK |
| | GQ-VL | | |
| 2083 | BC A7 27- | artificial | EIQMTQSPSSLSASVGDRVTITCQASQDISNYLNWYQQKPGKAPKLLIYYTSRLHTGV |
| | C4-G7 EI GQ | | PSRFSGSGSGTDFTFTISSLEPEDIATYYCQQGNTLPWTFGQGTKVEIK |
| | -VL | | |
| 2084 | BC A7 27- | artificial | QVQLVQSGAEVKKPGASVKVSCKASGYTFTNHIIHWVRQAPGQGLEWMGYINPYPGYH |
| | C4-G7X I2C | | AYNEKFQGRATMTSDTSTSTVYMELSSLRSEDTAVYYCARDGYYRDTDVLDYWGQGTL |
| | -Full | | VTVSSGGGGSGGGGSGGGGSDIQMTQSPSSLSASVGDRVTITCQASQDISNYLNWYQQ |
| | Sequence | | KPGKAPKLLIYYTSRLHTGVPSRFSGSGSGTDFTFTISSLEPEDIATYYCQQGNTLPW |
| | | | TFGQGTKVEIKSGGGGSEVQLVESGGGLVQPGGSLKLSCAASGFTFNKYAMNWVRQAP |
| | | | GKGLEWVARIRSKYNNYATYYADSVKDRFTISRDDSKNTAYLQMNNLKTEDTAVYYCV |
| | | | RHGNFGNSYISYWAYWGQGTLVTVSSGGGGSGGGGSGGGGSQTVVTQEPSLTVSPGGT |
| | | | VTLTCGSSTGAVTSGNYPNWVQQKPGQAPRGLIGGTKFLAPGTPARFSGSLLGGKAAL |
| | | | TLSGVQPEDEAEYYCVLWYSNRWVFGGGTKLTVL |
| 2085 | BC A7 27- | artificial | QVQLVQSGAEVKKPGASVKVSCKASGYTFTNHIIHWVRQAPGQGLEWMGYINPYPGYH |
| | C4-G7X I2E | | AYNEKFQGRATMTSDTSTSTVYMELSSLRSEDTAVYYCARDGYYRDTDVLDYWGQGTL |
| | -Full | | VTVSSGGGGSGGGGSGGGGSDIQMTQSPSSLSASVGDRVTITCQASQDISNYLNWYQQ |
| | Sequence | | KPGKAPKLLIYYTSRLHTGVPSRFSGSGSGTDFTFTISSLEPEDIATYYCQQGNTLPW |
| | | | TFGQGTKVEIKSGGGGSEVQLVESGGGLVQPGGSLKLSCAASGFTFNKYAINWVRQAP |
| | | | GKGLEWVARIRSKYNNYATYYADAVKDRFTISRDDSKNTVYLQMNNLKTEDTAVYYCA |
| | | | RAGNFGSSYISYWAYWGQGTLVTVSSGGGGSGGGGSGGGGSQTVVTQEPSLTVSPGGT |
| | | | VTITCGSSTGAVTSGNYPNWVQKKPGQAPRGLIGGTKFLAPGTPARFSGSLSGGKAAL |
| | | | TLSGVQPEDEAEYYCVLWYSNRWVFGSGTKLTVL |
| 2086 | BC A7 27- | artificial | QVQLVQSGAEVKKPGASVKVSCKASGYTFTNHIIHWVRQAPGQGLEWMGYINPYPGYH |
| | C4-G7X I2K | | AYNEKFQGRATMTSDTSTSTVYMELSSLRSEDTAVYYCARDGYYRDTDVLDYWGQGTL |
| | -Full | | VTVSSGGGGSGGGGSGGGGSDIQMTQSPSSLSASVGDRVTITCQASQDISNYLNWYQQ |
| | Sequence | | KPGKAPKLLIYYTSRLHTGVPSRFSGSGSGTDFTFTISSLEPEDIATYYCQQGNTLPW |
| | | | TFGQGTKVEIKSGGGGSEVQLVESGGGLVQPGGSLKLSCAASGFTENKYAMNWVRQAP |
| | | | GKGLEWVARIRSKYNNYATYYAEAVKGRFTISRDDSKNTVYLQMNNLKTEDTAVYYCV |
| | | | RNENIGTSYISYWAYWGQGTLVTVSSGGGGSGGGGSGGGGSQTVVTQEPSLTVSPGGT |
| | | | VTITCGSSTGAVTSGNYPNWVQQKPGQAPRGLIGGTKFLAPGTPARFSGSLSGGKAAL |
| | | | TLSGVQPEDEAEYYCVLWYSNRWVFGSGTKLTVL |
| 2087 | BC A7 27- | artificial | QVQLVQSGAEVKKPGASVKVSCKASGYTFTNHIIHWVRQAPGQGLEWMGYINPYPGYH |
| | C4-G7X I2L | | AYNEKFQGRATMTSDTSTSTVYMELSSLRSEDTAVYYCARDGYYRDTDVLDYWGQGTL |
| | -Full | | VTVSSGGGGSGGGGSGGGGSDIQMTQSPSSLSASVGDRVTITCQASQDISNYLNWYQQ |
| | Sequence | | KPGKAPKLLIYYTSRLHTGVPSRFSGSGSGTDFTFTISSLEPEDIATYYCQQGNTLPW |
| | | | TFGQGTKVEIKSGGGGSEVQLVESGGGLVQPGGSLKLSCAASGFTENKYAMNWVRQAP |
| | | | GKGMEWVARIRSKYNNYATYYADAVKDRFTISRDDSKNTLYLQMNNLKTEDTAVYYCV |
| | | | RAGNFGSSYISYFAYWGQGTLVTVSSGGGGSGGGGSGGGGSQTVVTQEPSLTVSPGGT |
| | | | VTITCGSSTGAVTSGNYPNWIQKKPGQAPRGLIGGTKFLAPGTPARFSGSLEGGKAAL |
| | | | TLSGVQPEDEAEYYCVLYYSNRWVFGSGTKLTVL |
| 2088 | BC A7 27- | artificial | QVQLVQSGAEVKKPGASVKVSCKASGYTFTNHIIHWVRQAPGQGLEWMGYINPYPGYH |
| | C4-G7X I2M | | AYNEKFQGRATMTSDTSTSTVYMELSSLRSEDTAVYYCARDGYYRDTDVLDYWGQGTL |
| | -Full | | VTVSSGGGGSGGGGSGGGGSDIQMTQSPSSLSASVGDRVTITCQASQDISNYLNWYQQ |
| | Sequence | | KPGKAPKLLIYYTSRLHTGVPSRFSGSGSGTDFTFTISSLEPEDIATYYCQQGNTLPW |
| | | | TFGQGTKVEIKSGGGGSEVQLVESGGGLVQPGGSLKLSCAASGFTENKYAMNWVRQAP |
| | | | GKGMEWVARIRSKYNNYATYYADAVKDRFTISRDDSKNTLYLQMNNLKTEDTAVYYCV |
| | | | RAGNFGTSYISYWAYWGQGTLVTVSSGGGGSGGGGSGGGGSQTVVTQEPSLTVSPGGT |
| | | | VTITCGSSTGAVTSGNYPNWVQKKPGQAPRGLIGGTKFLAPGTPARFSGSLSGGKAAL |
| | | | TLSGVQPEDEAEYYCVLWYSNRWVFGSGTKLTVL |
| 2089 | BC A7 27- | artificial | QVQLVQSGAEVKKPGASVKVSCKASGYTFTNHIIHWVRQAPGQGLEWMGYINPYPGYH |
| | C4-G7X I2M2 | | AYNEKFQGRATMTSDTSTSTVYMELSSLRSEDTAVYYCARDGYYRDTDVLDYWGQGTL |
| | -Full | | VTVSSGGGGSGGGGSGGGGSDIQMTQSPSSLSASVGDRVTITCQASQDISNYLNWYQQ |
| | Sequence | | KPGKAPKLLIYYTSRLHTGVPSRFSGSGSGTDFTFTISSLEPEDIATYYCQQGNTLPW |
| | | | TFGQGTKVEIKSGGGGSEVQLVESGGGLVQPGGSLKLSCAASGFTENKYAINWVREAP |
| | | | GKGLEWVARIRSKYNNYATYYADAVKDRFTISRDDSKNTAYLQMNNLKTEDTAVYYCV |
| | | | RNANFGTSYISYFAYWGQGTLVTVSSGGGGSGGGGSGGGGSQTVVTQEPSLTVSPGGT |
| | | | VTLTCGSSTGAVTSGNYPNWVQKKPGQAPRGLIGGTKFLAPGTPARFSGSLLGGKAAL |
| | | | TLSGVQPEDEAEYYCVLWYSNRWVFGSGTKLTVL |
| 2090 | BC A7 27- | artificial | QVQLVQSGAEVKKPGASVKVSCKASGYTFTNHIIHWVRQAPGQCLEWMGYINPYPGYH |
| | C4-G7 CC X | | AYNEKFQGRATMTSDTSTSTVYMELSSLRSEDTAVYYCARDGYYRDTDVLDYWGQGTL |
| | I2C x scFc | | VTVSSGGGGSGGGGSGGGGSDIQMTQSPSSLSASVGDRVTITCQASQDISNYLNWYQQ |
| | -Full | | KPGKAPKLLIYYTSRLHTGVPSRFSGSGSGTDFTFTISSLEPEDIATYYCQQGNTLPW |
| | Sequence | | TFGCGTKVEIKSGGGGSEVQLVESGGGLVQPGGSLKLSCAASGFTFNKYAMNWVRQAP |
| | | | GKGLEWVARIRSKYNNYATYYADSVKDRFTISRDDSKNTAYLQMNNLKTEDTAVYYCV |
| | | | RHGNFGNSYISYWAYWGQGTLVTVSSGGGGSGGGGSGGGGSQTVVTQEPSLTVSPGGT |
| | | | VTLTCGSSTGAVTSGNYPNWVQQKPGQAPRGLIGGTKFLAPGTPARFSGSLLGGKAAL |
| | | | TLSGVQPEDEAEYYCVLWYSNRWVFGGGTKLTVLGGGGDKTHTCPPCPAPELLGGPSV |
| | | | FLFPPKPKDTLMISRTPEVTCVVVDVSHEDPEVKENWYVDGVEVHNAKTKPCEEQYGS |
| | | | TYRCVSVLTVLHQDWLNGKEYKCKVSNKALPAPIEKTISKAKGQPREPQVYTLPPSRE |
| | | | EMTKNQVSLTCLVKGFYPSDIAVEWESNGQPENNYKTTPPVLDSDGSFFLYSKLTVDK |
| | | | SRWQQGNVFSCSVMHEALHNHYTQKSLSLSPGKGGGGSGGGGSGGGGSGGGGSGGGGS |
| | | | GGGGSDKTHTCPPCPAPELLGGPSVFLFPPKPKDTLMISRTPEVTCVVVDVSHEDPEV |
| | | | KFNWYVDGVEVHNAKTKPCEEQYGSTYRCVSVLTVLHQDWLNGKEYKCKVSNKALPAP |
| | | | IEKTISKAKGQPREPQVYTLPPSREEMTKNQVSLTCLVKGFYPSDIAVEWESNGQPEN |
| | | | NYKTTPPVLDSDGSFFLYSKLTVDKSRWQQGNVFSCSVMHEALHNHYTQKSLSLSPGK |
| 2091 | BC A7 27- | artificial | QVQLVQSGAEVKKPGASVKVSCKASGYTFTNHIIHWVRQAPGQCLEWMGYINPYPGYH |
| | C4-G7 CC X | | AYNEKFQGRATMTSDTSTSTVYMELSSLRSEDTAVYYCARDGYYRDTDVLDYWGQGTL |
| | I2E x scFc | | VTVSSGGGGSGGGGSGGGGSDIQMTQSPSSLSASVGDRVTITCQASQDISNYLNWYQQ |
| | -Full | | KPGKAPKLLIYYTSRLHTGVPSRFSGSGSGTDFTFTISSLEPEDIATYYCQQGNTLPW |
| | Sequence | | TFGCGTKVEIKSGGGGSEVQLVESGGGLVQPGGSLKLSCAASGFTFNKYAINWVRQAP |
| | | | GKGLEWVARIRSKYNNYATYYADAVKDRFTISRDDSKNTVYLQMNNLKTEDTAVYYCA |
| | | | RAGNFGSSYISYWAYWGQGTLVTVSSGGGGSGGGGSGGGGSQTVVTQEPSLTVSPGGT |
| | | | VTITCGSSTGAVTSGNYPNWVQKKPGQAPRGLIGGTKFLAPGTPARFSGSLSGGKAAL |
| | | | TLSGVQPEDEAEYYCVLWYSNRWVFGSGTKLTVLGGGGDKTHTCPPCPAPELLGGPSV |
| | | | FLFPPKPKDTLMISRTPEVTCVVVDVSHEDPEVKFNWYVDGVEVHNAKTKPCEEQYGS |
| | | | TYRCVSVLTVLHQDWLNGKEYKCKVSNKALPAPIEKTISKAKGQPREPQVYTLPPSRE |
| | | | EMTKNQVSLTCLVKGFYPSDIAVEWESNGQPENNYKTTPPVLDSDGSFFLYSKLTVDK |
| | | | SRWQQGNVFSCSVMHEALHNHYTQKSLSLSPGKGGGGSGGGGSGGGGSGGGGSGGGGS |
| | | | GGGGSDKTHTCPPCPAPELLGGPSVFLFPPKPKDTLMISRTPEVTCVVVDVSHEDPEV |
| | | | KFNWYVDGVEVHNAKTKPCEEQYGSTYRCVSVLTVLHQDWLNGKEYKCKVSNKALPAP |
| | | | IEKTISKAKGQPREPQVYTLPPSREEMTKNQVSLTCLVKGFYPSDIAVEWESNGQPEN |
| | | | NYKTTPPVLDSDGSFFLYSKLTVDKSRWQQGNVFSCSVMHEALHNHYTQKSLSLSPGK |
| 2092 | BC A7 27- | artificial | QVQLVQSGAEVKKPGASVKVSCKASGYTFTNHIIHWVRQAPGQCLEWMGYINPYPGYH |
| | C4-G7 CC X | | AYNEKFQGRATMTSDTSTSTVYMELSSLRSEDTAVYYCARDGYYRDTDVLDYWGQGTL |
| | I2K x scFc | | VTVSSGGGGSGGGGSGGGGSDIQMTQSPSSLSASVGDRVTITCQASQDISNYLNWYQQ |
| | Full | | KPGKAPKLLIYYTSRLHTGVPSRFSGSGSGTDFTFTISSLEPEDIATYYCQQGNTLPW |
| | Sequence | | TFGCGTKVEIKSGGGGSEVQLVESGGGLVQPGGSLKLSCAASGFTENKYAMNWVRQAP |
| | | | GKGLEWVARIRSKYNNYATYYAEAVKGRFTISRDDSKNTVYLQMNNLKTEDTAVYYCV |
| | | | RNENIGTSYISYWAYWGQGTLVTVSSGGGGSGGGGSGGGGSQTVVTQEPSLTVSPGGT |
| | | | VTITCGSSTGAVTSGNYPNWVQQKPGQAPRGLIGGTKFLAPGTPARFSGSLSGGKAAL |
| | | | TLSGVQPEDEAEYYCVLWYSNRWVFGSGTKLTVLGGGGDKTHTCPPCPAPELLGGPSV |
| | | | FLFPPKPKDTLMISRTPEVTCVVVDVSHEDPEVKFNWYVDGVEVHNAKTKPCEEQYGS |
| | | | TYRCVSVLTVLHQDWLNGKEYKCKVSNKALPAPIEKTISKAKGQPREPQVYTLPPSRE |
| | | | EMTKNQVSLTCLVKGFYPSDIAVEWESNGQPENNYKTTPPVLDSDGSFFLYSKLTVDK |
| | | | SRWQQGNVFSCSVMHEALHNHYTQKSLSLSPGKGGGGSGGGGSGGGGSGGGGSGGGGS |
| | | | GGGGSDKTHTCPPCPAPELLGGPSVFLFPPKPKDTLMISRTPEVTCVVVDVSHEDPEV |
| | | | KFNWYVDGVEVHNAKTKPCEEQYGSTYRCVSVLTVLHQDWLNGKEYKCKVSNKALPAP |
| | | | IEKTISKAKGQPREPQVYTLPPSREEMTKNQVSLTCLVKGFYPSDIAVEWESNGQPEN |
| | | | NYKTTPPVLDSDGSFFLYSKLTVDKSRWQQGNVFSCSVMHEALHNHYTQKSLSLSPGK |
| 2093 | BC A7 27- | artificial | QVQLVQSGAEVKKPGASVKVSCKASGYTFTNHIIHWVRQAPGQCLEWMGYINPYPGYH |
| | C4-G7 CC X | | AYNEKFQGRATMTSDTSTSTVYMELSSLRSEDTAVYYCARDGYYRDTDVLDYWGQGTL |
| | I2L x scFc | | VTVSSGGGGSGGGGSGGGGSDIQMTQSPSSLSASVGDRVTITCQASQDISNYLNWYQQ |
| | -Full | | KPGKAPKLLIYYTSRLHTGVPSRFSGSGSGTDFTFTISSLEPEDIATYYCQQGNTLPW |
| | Sequence | | TFGCGTKVEIKSGGGGSEVQLVESGGGLVQPGGSLKLSCAASGFTFNKYAMNWVRQAP |
| | | | GKGMEWVARIRSKYNNYATYYADAVKDRFTISRDDSKNTLYLQMNNLKTEDTAVYYCV |
| | | | RAGNFGSSYISYFAYWGQGTLVTVSSGGGGSGGGGSGGGGSQTVVTQEPSLTVSPGGT |
| | | | VTITCGSSTGAVTSGNYPNWIQKKPGQAPRGLIGGTKFLAPGTPARFSGSLEGGKAAL |
| | | | TLSGVQPEDEAEYYCVLYYSNRWVFGSGTKLTVLGGGGDKTHTCPPCPAPELLGGPSV |
| | | | FLFPPKPKDTLMISRTPEVTCVVVDVSHEDPEVKENWYVDGVEVHNAKTKPCEEQYGS |
| | | | TYRCVSVLTVLHQDWLNGKEYKCKVSNKALPAPIEKTISKAKGQPREPQVYTLPPSRE |
| | | | EMTKNQVSLTCLVKGFYPSDIAVEWESNGQPENNYKTTPPVLDSDGSFFLYSKLTVDK |
| | | | SRWQQGNVFSCSVMHEALHNHYTQKSLSLSPGKGGGGSGGGGSGGGGSGGGGSGGGGS |
| | | | GGGGSDKTHTCPPCPAPELLGGPSVFLFPPKPKDTLMISRTPEVTCVVVDVSHEDPEV |
| | | | KFNWYVDGVEVHNAKTKPCEEQYGSTYRCVSVLTVLHQDWLNGKEYKCKVSNKALPAP |
| | | | IEKTISKAKGQPREPQVYTLPPSREEMTKNQVSLTCLVKGFYPSDIAVEWESNGQPEN |
| | | | NYKTTPPVLDSDGSFFLYSKLTVDKSRWQQGNVFSCSVMHEALHNHYTQKSLSLSPGK |
| 2094 | BC A7 27- | artificial | QVQLVQSGAEVKKPGASVKVSCKASGYTFTNHIIHWVRQAPGQCLEWMGYINPYPGYH |
| | C4-G7 CC X | | AYNEKFQGRATMTSDTSTSTVYMELSSLRSEDTAVYYCARDGYYRDTDVLDYWGQGTL |
| | I2M x scFc | | VTVSSGGGGSGGGGSGGGGSDIQMTQSPSSLSASVGDRVTITCQASQDISNYLNWYQQ |
| | -Full | | KPGKAPKLLIYYTSRLHTGVPSRFSGSGSGTDFTFTISSLEPEDIATYYCQQGNTLPW |
| | Sequence | | TFGCGTKVEIKSGGGGSEVQLVESGGGLVQPGGSLKLSCAASGFTENKYAMNWVRQAP |
| | | | GKGMEWVARIRSKYNNYATYYADAVKDRFTISRDDSKNTLYLQMNNLKTEDTAVYYCV |
| | | | RAGNFGTSYISYWAYWGQGTLVTVSSGGGGSGGGGSGGGGSQTVVTQEPSLTVSPGGT |
| | | | VTITCGSSTGAVTSGNYPNWVQKKPGQAPRGLIGGTKFLAPGTPARFSGSLSGGKAAL |
| | | | TLSGVQPEDEAEYYCVLWYSNRWVFGSGTKLTVLGGGGDKTHTCPPCPAPELLGGPSV |
| | | | FLFPPKPKDTLMISRTPEVTCVVVDVSHEDPEVKFNWYVDGVEVHNAKTKPCEEQYGS |
| | | | TYRCVSVLTVLHQDWLNGKEYKCKVSNKALPAPIEKTISKAKGQPREPQVYTLPPSRE |
| | | | EMTKNQVSLTCLVKGFYPSDIAVEWESNGQPENNYKTTPPVLDSDGSFFLYSKLTVDK |
| | | | SRWQQGNVFSCSVMHEALHNHYTQKSLSLSPGKGGGGSGGGGSGGGGSGGGGSGGGGS |
| | | | GGGGSDKTHTCPPCPAPELLGGPSVFLFPPKPKDTLMISRTPEVTCVVVDVSHEDPEV |
| | | | KFNWYVDGVEVHNAKTKPCEEQYGSTYRCVSVLTVLHQDWLNGKEYKCKVSNKALPAP |
| | | | IEKTISKAKGQPREPQVYTLPPSREEMTKNQVSLTCLVKGFYPSDIAVEWESNGQPEN |
| | | | NYKTTPPVLDSDGSFFLYSKLTVDKSRWQQGNVFSCSVMHEALHNHYTQKSLSLSPGK |
| 2095 | BC A7 27- | artificial | QVQLVQSGAEVKKPGASVKVSCKASGYTFTNHIIHWVRQAPGQCLEWMGYINPYPGYH |
| | C4-G7 CC X | | AYNEKFQGRATMTSDTSTSTVYMELSSLRSEDTAVYYCARDGYYRDTDVLDYWGQGTL |
| | I2M2 x scFc | | VTVSSGGGGSGGGGSGGGGSDIQMTQSPSSLSASVGDRVTITCQASQDISNYLNWYQQ |
| | -Full | | KPGKAPKLLIYYTSRLHTGVPSRFSGSGSGTDFTFTISSLEPEDIATYYCQQGNTLPW |
| | Sequence | | TFGCGTKVEIKSGGGGSEVQLVESGGGLVQPGGSLKLSCAASGFTFNKYAINWVREAP |
| | | | GKGLEWVARIRSKYNNYATYYADAVKDRFTISRDDSKNTAYLQMNNLKTEDTAVYYCV |
| | | | RNANFGTSYISYFAYWGQGTLVTVSSGGGGSGGGGSGGGGSQTVVTQEPSLTVSPGGT |
| | | | VTLTCGSSTGAVTSGNYPNWVQKKPGQAPRGLIGGTKFLAPGTPARFSGSLLGGKAAL |
| | | | TLSGVQPEDEAEYYCVLWYSNRWVFGSGTKLTVLGGGGDKTHTCPPCPAPELLGGPSV |
| | | | FLFPPKPKDTLMISRTPEVTCVVVDVSHEDPEVKFNWYVDGVEVHNAKTKPCEEQYGS |
| | | | TYRCVSVLTVLHQDWLNGKEYKCKVSNKALPAPIEKTISKAKGQPREPQVYTLPPSRE |
| | | | EMTKNQVSLTCLVKGFYPSDIAVEWESNGQPENNYKTTPPVLDSDGSFFLYSKLTVDK |
| | | | SRWQQGNVFSCSVMHEALHNHYTQKSLSLSPGKGGGGSGGGGSGGGGSGGGGSGGGGS |
| | | | GGGGSDKTHTCPPCPAPELLGGPSVFLFPPKPKDTLMISRTPEVTCVVVDVSHEDPEV |
| | | | KFNWYVDGVEVHNAKTKPCEEQYGSTYRCVSVLTVLHQDWLNGKEYKCKVSNKALPAP |
| | | | IEKTISKAKGQPREPQVYTLPPSREEMTKNQVSLTCLVKGFYPSDIAVEWESNGQPEN |
| | | | NYKTTPPVLDSDGSFFLYSKLTVDKSRWQQGNVFSCSVMHEALHNHYTQKSLSLSPGK |
| 2096 | CD123 24- | artificial | HYAMS |
| | B4-f NK CC | | |
| | -HCDR1 | | |
| 2097 | CD123 24- | artificial | AVSGGGDKTLYADAVKG |
| | B4-f NK CC | | |
| | -HCDR2 | | |
| 2098 | CD123 24- | artificial | LRGFYYGMDV |
| | B4-f NK CC | | |
| | -HCDR3 | | |
| 2099 | CD123 24- | artificial | RSSQSLLHSNKYNYLD |
| | B4-f NK CC | | |
| | -LCDR1 | | |
| 2100 | CD123 24- | artificial | LGSNRAS |
| | B4-f NK CC | | |
| | -LCDR2 | | |
| 2101 | CD123 24- | artificial | MQALQTPPIT |
| | B4-f NK CC | | |
| | -LCDR3 | | |
| 2102 | CD123 24- | artificial | EVQLLESGGGLVQPGGSLRLSCAASGFTFSHYAMSWVRQAPGKCLEWVSAVSGGGDKT |
| | B4-f NK CC | | LYADAVKGRFTISRDNSKNTLFLQMNSLRAEDTAIYYCARLRGFYYGMDVWGQGTTVT |
| | -VH | | VSS |
| 2103 | CD123 24- | artificial | DIVLTQSPLSLPVTPGEPASISCRSSQSLLHSNKYNYLDWYLQKPGQSPQLLIYLGSN |
| | B4-f NK CC | | RASGVPDRFSGSGSGTDFTLKISRVEAEDVGVYYCMQALQTPPITFGCGTRLEIK |
| | -VL | | |
| 2104 | CD123 24- | artificial | EIVLTQSPLSLPVTPGEPASISCRSSQSLLHSNKYNYLDWYLQKPGQSPQLLIYLGSN |
| | B4-f NK CC | | RASGVPDRFSGSGSGTDFTLKISRVEAEDVGVYYCMQALQTPPITFGCGTRLEIK |
| | EI GQ-VL | | |
| 2105 | CD123 24- | artificial | EVQLLESGGGLVQPGGSLRLSCAASGFTFSHYAMSWVRQAPGKCLEWVSAVSGGGDKT |
| | B4-f NK CC | | LYADAVKGRFTISRDNSKNTLFLQMNSLRAEDTAIYYCARLRGFYYGMDVWGQGTTVT |
| | x I2C x | | VSSGGGGSGGGGSGGGGSDIVLTQSPLSLPVTPGEPASISCRSSQSLLHSNKYNYLDW |
| | ScFc-Full | | YLQKPGQSPQLLIYLGSNRASGVPDRFSGSGSGTDFTLKISRVEAEDVGVYYCMQALQ |
| | Sequence | | TPPITFGCGTRLEIKSGGGGSEVQLVESGGGLVQPGGSLKLSCAASGFTENKYAMNWV |
| | | | RQAPGKGLEWVARIRSKYNNYATYYADSVKDRFTISRDDSKNTAYLQMNNLKTEDTAV |
| | | | YYCVRHGNFGNSYISYWAYWGQGTLVTVSSGGGGSGGGGSGGGGSQTVVTQEPSLTVS |
| | | | PGGTVTLTCGSSTGAVTSGNYPNWVQQKPGQAPRGLIGGTKFLAPGTPARFSGSLLGG |
| | | | KAALTLSGVQPEDEAEYYCVLWYSNRWVFGGGTKLTVLGGGGDKTHTCPPCPAPELLG |
| | | | GPSVFLFPPKPKDTLMISRTPEVTCVVVDVSHEDPEVKFNWYVDGVEVHNAKTKPCEE |
| | | | QYGSTYRCVSVLTVLHQDWLNGKEYKCKVSNKALPAPIEKTISKAKGQPREPQVYTLP |
| | | | PSREEMTKNQVSLTCLVKGFYPSDIAVEWESNGQPENNYKTTPPVLDSDGSFFLYSKL |
| | | | TVDKSRWQQGNVFSCSVMHEALHNHYTQKSLSLSPGKGGGGSGGGGSGGGGSGGGGSG |
| | | | GGGSGGGGSDKTHTCPPCPAPELLGGPSVFLFPPKPKDTLMISRTPEVTCVVVDVSHE |
| | | | DPEVKFNWYVDGVEVHNAKTKPCEEQYGSTYRCVSVLTVLHQDWLNGKEYKCKVSNKA |
| | | | LPAPIEKTISKAKGQPREPQVYTLPPSREEMTKNQVSLTCLVKGFYPSDIAVEWESNG |
| | | | QPENNYKTTPPVLDSDGSFFLYSKLTVDKSRWQQGNVFSCSVMHEALHNHYTQKSLSL |
| | | | SPGK |
| 2106 | CD123 24- | artificial | EVQLLESGGGLVQPGGSLRLSCAASGFTFSHYAMSWVRQAPGKCLEWVSAVSGGGDKT |
| | B4-f NK CC | | LYADAVKGRFTISRDNSKNTLFLQMNSLRAEDTAIYYCARLRGFYYGMDVWGQGTTVT |
| | x I2E x | | VSSGGGGSGGGGSGGGGSDIVLTQSPLSLPVTPGEPASISCRSSQSLLHSNKYNYLDW |
| | scFc-Full | | YLQKPGQSPQLLIYLGSNRASGVPDRFSGSGSGTDFTLKISRVEAEDVGVYYCMQALQ |
| | Sequence | | TPPITFGCGTRLEIKSGGGGSEVQLVESGGGLVQPGGSLKLSCAASGFTENKYAINWV |
| | | | RQAPGKGLEWVARIRSKYNNYATYYADAVKDRFTISRDDSKNTVYLQMNNLKTEDTAV |
| | | | YYCARAGNFGSSYISYWAYWGQGTLVTVSSGGGGSGGGGSGGGGSQTVVTQEPSLTVS |
| | | | PGGTVTITCGSSTGAVTSGNYPNWVQKKPGQAPRGLIGGTKFLAPGTPARFSGSLSGG |
| | | | KAALTLSGVQPEDEAEYYCVLWYSNRWVFGSGTKLTVLGGGGDKTHTCPPCPAPELLG |
| | | | GPSVFLFPPKPKDTLMISRTPEVTCVVVDVSHEDPEVKFNWYVDGVEVHNAKTKPCEE |
| | | | QYGSTYRCVSVLTVLHQDWLNGKEYKCKVSNKALPAPIEKTISKAKGQPREPQVYTLP |
| | | | PSREEMTKNQVSLTCLVKGFYPSDIAVEWESNGQPENNYKTTPPVLDSDGSFFLYSKL |
| | | | TVDKSRWQQGNVFSCSVMHEALHNHYTQKSLSLSPGKGGGGSGGGGSGGGGSGGGGSG |
| | | | GGGSGGGGSDKTHTCPPCPAPELLGGPSVFLFPPKPKDTLMISRTPEVTCVVVDVSHE |
| | | | DPEVKFNWYVDGVEVHNAKTKPCEEQYGSTYRCVSVLTVLHQDWLNGKEYKCKVSNKA |
| | | | LPAPIEKTISKAKGQPREPQVYTLPPSREEMTKNQVSLTCLVKGFYPSDIAVEWESNG |
| | | | QPENNYKTTPPVLDSDGSFFLYSKLTVDKSRWQQGNVFSCSVMHEALHNHYTQKSLSL |
| | | | SPGK |
| 2107 | CD123 24- | artificial | EVQLLESGGGLVQPGGSLRLSCAASGFTFSHYAMSWVRQAPGKCLEWVSAVSGGGDKT |
| | B4-f NK CC | | LYADAVKGRFTISRDNSKNTLFLQMNSLRAEDTAIYYCARLRGFYYGMDVWGQGTTVT |
| | x I2K x | | VSSGGGGSGGGGSGGGGSDIVLTQSPLSLPVTPGEPASISCRSSQSLLHSNKYNYLDW |
| | scFc-Full | | YLQKPGQSPQLLIYLGSNRASGVPDRFSGSGSGTDFTLKISRVEAEDVGVYYCMQALQ |
| | Sequence | | TPPITFGCGTRLEIKSGGGGSEVQLVESGGGLVQPGGSLKLSCAASGFTENKYAMNWV |
| | | | RQAPGKGLEWVARIRSKYNNYATYYAEAVKGRFTISRDDSKNTVYLQMNNLKTEDTAV |
| | | | YYCVRNENIGTSYISYWAYWGQGTLVTVSSGGGGSGGGGSGGGGSQTVVTQEPSLTVS |
| | | | PGGTVTITCGSSTGAVTSGNYPNWVQQKPGQAPRGLIGGTKFLAPGTPARFSGSLSGG |
| | | | KAALTLSGVQPEDEAEYYCVLWYSNRWVFGSGTKLTVLGGGGDKTHTCPPCPAPELLG |
| | | | GPSVFLFPPKPKDTLMISRTPEVTCVVVDVSHEDPEVKFNWYVDGVEVHNAKTKPCEE |
| | | | QYGSTYRCVSVLTVLHQDWLNGKEYKCKVSNKALPAPIEKTISKAKGQPREPQVYTLP |
| | | | PSREEMTKNQVSLTCLVKGFYPSDIAVEWESNGQPENNYKTTPPVLDSDGSFFLYSKL |
| | | | TVDKSRWQQGNVFSCSVMHEALHNHYTQKSLSLSPGKGGGGSGGGGSGGGGSGGGGSG |
| | | | GGGSGGGGSDKTHTCPPCPAPELLGGPSVFLFPPKPKDTLMISRTPEVTCVVVDVSHE |
| | | | DPEVKFNWYVDGVEVHNAKTKPCEEQYGSTYRCVSVLTVLHQDWLNGKEYKCKVSNKA |
| | | | LPAPIEKTISKAKGQPREPQVYTLPPSREEMTKNQVSLTCLVKGFYPSDIAVEWESNG |
| | | | QPENNYKTTPPVLDSDGSFFLYSKLTVDKSRWQQGNVFSCSVMHEALHNHYTQKSLSL |
| | | | SPGK |
| 2108 | CD123 24- | artificial | EVQLLESGGGLVQPGGSLRLSCAASGFTFSHYAMSWVRQAPGKCLEWVSAVSGGGDKT |
| | B4-f NK CC | | LYADAVKGRFTISRDNSKNTLFLQMNSLRAEDTAIYYCARLRGFYYGMDVWGQGTTVT |
| | x I2L x | | VSSGGGGSGGGGSGGGGSDIVLTQSPLSLPVTPGEPASISCRSSQSLLHSNKYNYLDW |
| | scFc-Full | | YLQKPGQSPQLLIYLGSNRASGVPDRFSGSGSGTDFTLKISRVEAEDVGVYYCMQALQ |
| | Sequence | | TPPITFGCGTRLEIKSGGGGSEVQLVESGGGLVQPGGSLKLSCAASGFTENKYAMNWV |
| | | | RQAPGKGMEWVARIRSKYNNYATYYADAVKDRFTISRDDSKNTLYLQMNNLKTEDTAV |
| | | | YYCVRAGNFGSSYISYFAYWGQGTLVTVSSGGGGSGGGGSGGGGSQTVVTQEPSLTVS |
| | | | PGGTVTITCGSSTGAVTSGNYPNWIQKKPGQAPRGLIGGTKFLAPGTPARFSGSLEGG |
| | | | KAALTLSGVQPEDEAEYYCVLYYSNRWVFGSGTKLTVLGGGGDKTHTCPPCPAPELLG |
| | | | GPSVFLFPPKPKDTLMISRTPEVTCVVVDVSHEDPEVKENWYVDGVEVHNAKTKPCEE |
| | | | QYGSTYRCVSVLTVLHQDWLNGKEYKCKVSNKALPAPIEKTISKAKGQPREPQVYTLP |
| | | | PSREEMTKNQVSLTCLVKGFYPSDIAVEWESNGQPENNYKTTPPVLDSDGSFFLYSKL |
| | | | TVDKSRWQQGNVFSCSVMHEALHNHYTQKSLSLSPGKGGGGSGGGGSGGGGSGGGGSG |
| | | | GGGSGGGGSDKTHTCPPCPAPELLGGPSVFLFPPKPKDTLMISRTPEVTCVVVDVSHE |
| | | | DPEVKFNWYVDGVEVHNAKTKPCEEQYGSTYRCVSVLTVLHQDWLNGKEYKCKVSNKA |
| | | | LPAPIEKTISKAKGQPREPQVYTLPPSREEMTKNQVSLTCLVKGFYPSDIAVEWESNG |
| | | | QPENNYKTTPPVLDSDGSFFLYSKLTVDKSRWQQGNVFSCSVMHEALHNHYTQKSLSL |
| | | | SPGK |
| 2109 | CD123 24- | artificial | EVQLLESGGGLVQPGGSLRLSCAASGFTFSHYAMSWVRQAPGKCLEWVSAVSGGGDKT |
| | B4-f NK CC | | LYADAVKGRFTISRDNSKNTLFLQMNSLRAEDTAIYYCARLRGFYYGMDVWGQGTTVT |
| | x I2M X | | VSSGGGGSGGGGSGGGGSDIVLTQSPLSLPVTPGEPASISCRSSQSLLHSNKYNYLDW |
| | scFc-Full | | YLQKPGQSPQLLIYLGSNRASGVPDRFSGSGSGTDFTLKISRVEAEDVGVYYCMQALQ |
| | Sequence | | TPPITFGCGTRLEIKSGGGGSEVQLVESGGGLVQPGGSLKLSCAASGFTENKYAMNWV |
| | | | RQAPGKGMEWVARIRSKYNNYATYYADAVKDRFTISRDDSKNTLYLQMNNLKTEDTAV |
| | | | YYCVRAGNFGTSYISYWAYWGQGTLVTVSSGGGGSGGGGSGGGGSQTVVTQEPSLTVS |
| | | | PGGTVTITCGSSTGAVTSGNYPNWVQKKPGQAPRGLIGGTKFLAPGTPARFSGSLSGG |
| | | | KAALTLSGVQPEDEAEYYCVLWYSNRWVFGSGTKLTVLGGGGDKTHTCPPCPAPELLG |
| | | | GPSVFLFPPKPKDTLMISRTPEVTCVVVDVSHEDPEVKENWYVDGVEVHNAKTKPCEE |
| | | | QYGSTYRCVSVLTVLHQDWLNGKEYKCKVSNKALPAPIEKTISKAKGQPREPQVYTLP |
| | | | PSREEMTKNQVSLTCLVKGFYPSDIAVEWESNGQPENNYKTTPPVLDSDGSFFLYSKL |
| | | | TVDKSRWQQGNVFSCSVMHEALHNHYTQKSLSLSPGKGGGGSGGGGSGGGGSGGGGSG |
| | | | GGGSGGGGSDKTHTCPPCPAPELLGGPSVFLFPPKPKDTLMISRTPEVTCVVVDVSHE |
| | | | DPEVKFNWYVDGVEVHNAKTKPCEEQYGSTYRCVSVLTVLHQDWLNGKEYKCKVSNKA |
| | | | LPAPIEKTISKAKGQPREPQVYTLPPSREEMTKNQVSLTCLVKGFYPSDIAVEWESNG |
| | | | QPENNYKTTPPVLDSDGSFFLYSKLTVDKSRWQQGNVFSCSVMHEALHNHYTQKSLSL |
| | | | SPGK |
| 2110 | CD123 24- | artificial | EVQLLESGGGLVQPGGSLRLSCAASGFTFSHYAMSWVRQAPGKCLEWVSAVSGGGDKT |
| | B4-f NK CC | | LYADAVKGRFTISRDNSKNTLFLQMNSLRAEDTAIYYCARLRGFYYGMDVWGQGTTVT |
| | x I2M2 X | | VSSGGGGSGGGGSGGGGSDIVLTQSPLSLPVTPGEPASISCRSSQSLLHSNKYNYLDW |
| | ScFc-Full | | YLQKPGQSPQLLIYLGSNRASGVPDRFSGSGSGTDFTLKISRVEAEDVGVYYCMQALQ |
| | Sequence | | TPPITFGCGTRLEIKSGGGGSEVQLVESGGGLVQPGGSLKLSCAASGFTENKYAINWV |
| | | | REAPGKGLEWVARIRSKYNNYATYYADAVKDRFTISRDDSKNTAYLQMNNLKTEDTAV |
| | | | YYCVRNANFGTSYISYFAYWGQGTLVTVSSGGGGSGGGGSGGGGSQTVVTQEPSLTVS |
| | | | PGGTVTLTCGSSTGAVTSGNYPNWVQKKPGQAPRGLIGGTKFLAPGTPARFSGSLLGG |
| | | | KAALTLSGVQPEDEAEYYCVLWYSNRWVFGSGTKLTVLGGGGDKTHTCPPCPAPELLG |
| | | | GPSVFLFPPKPKDTLMISRTPEVTCVVVDVSHEDPEVKENWYVDGVEVHNAKTKPCEE |
| | | | QYGSTYRCVSVLTVLHQDWLNGKEYKCKVSNKALPAPIEKTISKAKGQPREPQVYTLP |
| | | | PSREEMTKNQVSLTCLVKGFYPSDIAVEWESNGQPENNYKTTPPVLDSDGSFFLYSKL |
| | | | TVDKSRWQQGNVFSCSVMHEALHNHYTQKSLSLSPGKGGGGSGGGGSGGGGSGGGGSG |
| | | | GGGSGGGGSDKTHTCPPCPAPELLGGPSVFLFPPKPKDTLMISRTPEVTCVVVDVSHE |
| | | | DPEVKFNWYVDGVEVHNAKTKPCEEQYGSTYRCVSVLTVLHQDWLNGKEYKCKVSNKA |
| | | | LPAPIEKTISKAKGQPREPQVYTLPPSREEMTKNQVSLTCLVKGFYPSDIAVEWESNG |
| | | | QPENNYKTTPPVLDSDGSFFLYSKLTVDKSRWQQGNVFSCSVMHEALHNHYTQKSLSL |
| | | | SPGK |
| 2111 | CD19 97- | artificial | SYGMH |
| | G1RE-C2 LH | | |
| | CC-HCDR1 | | |
| 2112 | CD19 97- | artificial | VISYEGSNKYYAESVKG |
| | G1RE-C2 LH | | |
| | CC-HCDR2 | | |
| 2113 | CD19 97- | artificial | DRGTIFGNYGLEV |
| | G1RE-C2 LH | | |
| | CC-HCDR3 | | |
| 2114 | CD19 97- | artificial | RSSQSLLHKNAFNYLD |
| | G1RE-C2 LH | | |
| | CC-LCDR1 | | |
| 2115 | CD19 97- | artificial | LGSNRAS |
| | G1RE-C2 LH | | |
| | CC-LCDR2 | | |
| 2116 | CD19 97- | artificial | MQALQTPFT |
| | G1RE-C2 LH | | |
| | CC-LCDR3 | | |
| 2117 | CD19 97- | artificial | QVQLVESGGGVVQPGRSLRLSCAASGFTFSSYGMHWVRQAPGKCLEWVAVISYEGSNK |
| | G1RE-C2 LH | | YYAESVKGRFTISRDNSKNTLYLQMNSLRDEDTAVYYCARDRGTIFGNYGLEVWGQGT |
| | CC-VH | | TVTVSS |
| 2118 | CD19 97- | artificial | DIVMTQSPLSLPVISGEPASISCRSSQSLLHKNAFNYLDWYLQKPGQSPQLLIYLGSN |
| | G1RE-C2 LH | | RASGVPDRFSGSGSGTDFTLKISRVEAEDVGVYYCMQALQTPFTFGCGTKVDIK |
| | CC-VL | | |
| 2119 | CD19 97- | artificial | EIVMTQSPLSLPVISGEPASISCRSSQSLLHKNAFNYLDWYLQKPGQSPQLLIYLGSN |
| | G1RE-C2 LH | | RASGVPDRFSGSGSGTDFTLKISRVEAEDVGVYYCMQALQTPFTFGCGTKVDIK |
| | CC EI GQ- | | |
| | VL | | |
| 2120 | CD19 97- | artificial | DIVMTQSPLSLPVISGEPASISCRSSQSLLHKNAFNYLDWYLQKPGQSPQLLIYLGSN |
| | G1RE-C2 LH | | RASGVPDRFSGSGSGTDFTLKISRVEAEDVGVYYCMQALQTPFTFGCGTKVDIKGGGG |
| | CC x I2C x | | SGGGGSGGGGSQVQLVESGGGVVQPGRSLRLSCAASGFTFSSYGMHWVRQAPGKCLEW |
| | scFc-Full | | VAVISYEGSNKYYAESVKGRFTISRDNSKNTLYLQMNSLRDEDTAVYYCARDRGTIFG |
| | Sequence | | NYGLEVWGQGTTVTVSSSGGGGSEVQLVESGGGLVQPGGSLKLSCAASGFTENKYAMN |
| | | | WVRQAPGKGLEWVARIRSKYNNYATYYADSVKDRFTISRDDSKNTAYLQMNNLKTEDT |
| | | | AVYYCVRHGNFGNSYISYWAYWGQGTLVTVSSGGGGSGGGGSGGGGSQTVVTQEPSLT |
| | | | VSPGGTVTLTCGSSTGAVTSGNYPNWVQQKPGQAPRGLIGGTKFLAPGTPARFSGSLL |
| | | | GGKAALTLSGVQPEDEAEYYCVLWYSNRWVFGGGTKLTVLGGGGDKTHTCPPCPAPEL |
| | | | LGGPSVFLFPPKPKDTLMISRTPEVTCVVVDVSHEDPEVKENWYVDGVEVHNAKTKPC |
| | | | EEQYGSTYRCVSVLTVLHQDWLNGKEYKCKVSNKALPAPIEKTISKAKGQPREPQVYT |
| | | | LPPSREEMTKNQVSLTCLVKGFYPSDIAVEWESNGQPENNYKTTPPVLDSDGSFFLYS |
| | | | KLTVDKSRWQQGNVFSCSVMHEALHNHYTQKSLSLSPGKGGGGSGGGGSGGGGSGGGG |
| | | | SGGGGSGGGGSDKTHTCPPCPAPELLGGPSVFLFPPKPKDTLMISRTPEVTCVVVDVS |
| | | | HEDPEVKFNWYVDGVEVHNAKTKPCEEQYGSTYRCVSVLTVLHQDWLNGKEYKCKVSN |
| | | | KALPAPIEKTISKAKGQPREPQVYTLPPSREEMTKNQVSLTCLVKGFYPSDIAVEWES |
| | | | NGQPENNYKTTPPVLDSDGSFFLYSKLTVDKSRWQQGNVFSCSVMHEALHNHYTQKSL |
| | | | SLSPGK |
| 2121 | CD19 97- | artificial | DIVMTQSPLSLPVISGEPASISCRSSQSLLHKNAFNYLDWYLQKPGQSPQLLIYLGSN |
| | G1RE-C2 LH | | RASGVPDRFSGSGSGTDFTLKISRVEAEDVGVYYCMQALQTPFTFGCGTKVDIKGGGG |
| | CC x I2E X | | SGGGGSGGGGSQVQLVESGGGVVQPGRSLRLSCAASGFTFSSYGMHWVRQAPGKCLEW |
| | scFc-Full | | VAVISYEGSNKYYAESVKGRFTISRDNSKNTLYLQMNSLRDEDTAVYYCARDRGTIFG |
| | Sequence | | NYGLEVWGQGTTVTVSSSGGGGSEVQLVESGGGLVQPGGSLKLSCAASGFTENKYAIN |
| | | | WVRQAPGKGLEWVARIRSKYNNYATYYADAVKDRFTISRDDSKNTVYLQMNNLKTEDT |
| | | | AVYYCARAGNFGSSYISYWAYWGQGTLVTVSSGGGGSGGGGSGGGGSQTVVTQEPSLT |
| | | | VSPGGTVTITCGSSTGAVTSGNYPNWVQKKPGQAPRGLIGGTKFLAPGTPARFSGSLS |
| | | | GGKAALTLSGVQPEDEAEYYCVLWYSNRWVFGSGTKLTVLGGGGDKTHTCPPCPAPEL |
| | | | LGGPSVFLFPPKPKDTLMISRTPEVTCVVVDVSHEDPEVKENWYVDGVEVHNAKTKPC |
| | | | EEQYGSTYRCVSVLTVLHQDWLNGKEYKCKVSNKALPAPIEKTISKAKGQPREPQVYT |
| | | | LPPSREEMTKNQVSLTCLVKGFYPSDIAVEWESNGQPENNYKTTPPVLDSDGSFFLYS |
| | | | KLTVDKSRWQQGNVFSCSVMHEALHNHYTQKSLSLSPGKGGGGSGGGGSGGGGSGGGG |
| | | | SGGGGSGGGGSDKTHTCPPCPAPELLGGPSVFLFPPKPKDTLMISRTPEVTCVVVDVS |
| | | | HEDPEVKFNWYVDGVEVHNAKTKPCEEQYGSTYRCVSVLTVLHQDWLNGKEYKCKVSN |
| | | | KALPAPIEKTISKAKGQPREPQVYTLPPSREEMTKNQVSLTCLVKGFYPSDIAVEWES |
| | | | NGQPENNYKTTPPVLDSDGSFFLYSKLTVDKSRWQQGNVFSCSVMHEALHNHYTQKSL |
| | | | SLSPGK |
| 2122 | CD19 97- | artificial | DIVMTQSPLSLPVISGEPASISCRSSQSLLHKNAFNYLDWYLQKPGQSPQLLIYLGSN |
| | G1RE-C2 LH | | RASGVPDRFSGSGSGTDFTLKISRVEAEDVGVYYCMQALQTPFTFGCGTKVDIKGGGG |
| | CC x I2K X | | SGGGGSGGGGSQVQLVESGGGVVQPGRSLRLSCAASGFTFSSYGMHWVRQAPGKCLEW |
| | scFc-Full | | VAVISYEGSNKYYAESVKGRFTISRDNSKNTLYLQMNSLRDEDTAVYYCARDRGTIFG |
| | Sequence | | NYGLEVWGQGTTVTVSSSGGGGSEVQLVESGGGLVQPGGSLKLSCAASGFTENKYAMN |
| | | | WVRQAPGKGLEWVARIRSKYNNYATYYAEAVKGRFTISRDDSKNTVYLQMNNLKTEDT |
| | | | AVYYCVRNENIGTSYISYWAYWGQGTLVTVSSGGGGSGGGGSGGGGSQTVVTQEPSLT |
| | | | VSPGGTVTITCGSSTGAVTSGNYPNWVQQKPGQAPRGLIGGTKFLAPGTPARFSGSLS |
| | | | GGKAALTLSGVQPEDEAEYYCVLWYSNRWVFGSGTKLTVLGGGGDKTHTCPPCPAPEL |
| | | | LGGPSVFLFPPKPKDTLMISRTPEVTCVVVDVSHEDPEVKENWYVDGVEVHNAKTKPC |
| | | | EEQYGSTYRCVSVLTVLHQDWLNGKEYKCKVSNKALPAPIEKTISKAKGQPREPQVYT |
| | | | LPPSREEMTKNQVSLTCLVKGFYPSDIAVEWESNGQPENNYKTTPPVLDSDGSFFLYS |
| | | | KLTVDKSRWQQGNVFSCSVMHEALHNHYTQKSLSLSPGKGGGGSGGGGSGGGGSGGGG |
| | | | SGGGGSGGGGSDKTHTCPPCPAPELLGGPSVFLFPPKPKDTLMISRTPEVTCVVVDVS |
| | | | HEDPEVKFNWYVDGVEVHNAKTKPCEEQYGSTYRCVSVLTVLHQDWLNGKEYKCKVSN |
| | | | KALPAPIEKTISKAKGQPREPQVYTLPPSREEMTKNQVSLTCLVKGFYPSDIAVEWES |
| | | | NGQPENNYKTTPPVLDSDGSFFLYSKLTVDKSRWQQGNVFSCSVMHEALHNHYTQKSL |
| | | | SLSPGK |
| 2123 | CD19 97- | artificial | DIVMTQSPLSLPVISGEPASISCRSSQSLLHKNAFNYLDWYLQKPGQSPQLLIYLGSN |
| | G1RE-C2 LH | | RASGVPDRFSGSGSGTDFTLKISRVEAEDVGVYYCMQALQTPFTFGCGTKVDIKGGGG |
| | CC x I2L x | | SGGGGSGGGGSQVQLVESGGGVVQPGRSLRLSCAASGFTFSSYGMHWVRQAPGKCLEW |
| | scFc-Full | | VAVISYEGSNKYYAESVKGRFTISRDNSKNTLYLQMNSLRDEDTAVYYCARDRGTIFG |
| | Sequence | | NYGLEVWGQGTTVTVSSSGGGGSEVQLVESGGGLVQPGGSLKLSCAASGFTENKYAMN |
| | | | WVRQAPGKGMEWVARIRSKYNNYATYYADAVKDRFTISRDDSKNTLYLQMNNLKTEDT |
| | | | AVYYCVRAGNFGSSYISYFAYWGQGTLVTVSSGGGGSGGGGSGGGGSQTVVTQEPSLT |
| | | | VSPGGTVTITCGSSTGAVTSGNYPNWIQKKPGQAPRGLIGGTKFLAPGTPARFSGSLE |
| | | | GGKAALTLSGVQPEDEAEYYCVLYYSNRWVFGSGTKLTVLGGGGDKTHTCPPCPAPEL |
| | | | LGGPSVFLFPPKPKDTLMISRTPEVTCVVVDVSHEDPEVKFNWYVDGVEVHNAKTKPC |
| | | | EEQYGSTYRCVSVLTVLHQDWLNGKEYKCKVSNKALPAPIEKTISKAKGQPREPQVYT |
| | | | LPPSREEMTKNQVSLTCLVKGFYPSDIAVEWESNGQPENNYKTTPPVLDSDGSFFLYS |
| | | | KLTVDKSRWQQGNVFSCSVMHEALHNHYTQKSLSLSPGKGGGGSGGGGSGGGGSGGGG |
| | | | SGGGGSGGGGSDKTHTCPPCPAPELLGGPSVFLFPPKPKDTLMISRTPEVTCVVVDVS |
| | | | HEDPEVKFNWYVDGVEVHNAKTKPCEEQYGSTYRCVSVLTVLHQDWLNGKEYKCKVSN |
| | | | KALPAPIEKTISKAKGQPREPQVYTLPPSREEMTKNQVSLTCLVKGFYPSDIAVEWES |
| | | | NGQPENNYKTTPPVLDSDGSFFLYSKLTVDKSRWQQGNVFSCSVMHEALHNHYTQKSL |
| | | | SLSPGK |
| 2124 | CD19 97- | artificial | DIVMTQSPLSLPVISGEPASISCRSSQSLLHKNAFNYLDWYLQKPGQSPQLLIYLGSN |
| | G1RE-C2 LH | | RASGVPDRFSGSGSGTDFTLKISRVEAEDVGVYYCMQALQTPFTFGCGTKVDIKGGGG |
| | CC x I2M X | | SGGGGSGGGGSQVQLVESGGGVVQPGRSLRLSCAASGFTFSSYGMHWVRQAPGKCLEW |
| | scFc-Full | | VAVISYEGSNKYYAESVKGRFTISRDNSKNTLYLQMNSLRDEDTAVYYCARDRGTIFG |
| | Sequence | | NYGLEVWGQGTTVTVSSSGGGGSEVQLVESGGGLVQPGGSLKLSCAASGFTENKYAMN |
| | | | WVRQAPGKGMEWVARIRSKYNNYATYYADAVKDRFTISRDDSKNTLYLQMNNLKTEDT |
| | | | AVYYCVRAGNFGTSYISYWAYWGQGTLVTVSSGGGGSGGGGSGGGGSQTVVTQEPSLT |
| | | | VSPGGTVTITCGSSTGAVTSGNYPNWVQKKPGQAPRGLIGGTKFLAPGTPARFSGSLS |
| | | | GGKAALTLSGVQPEDEAEYYCVLWYSNRWVFGSGTKLTVLGGGGDKTHTCPPCPAPEL |
| | | | LGGPSVFLFPPKPKDTLMISRTPEVTCVVVDVSHEDPEVKENWYVDGVEVHNAKTKPC |
| | | | EEQYGSTYRCVSVLTVLHQDWLNGKEYKCKVSNKALPAPIEKTISKAKGQPREPQVYT |
| | | | LPPSREEMTKNQVSLTCLVKGFYPSDIAVEWESNGQPENNYKTTPPVLDSDGSFFLYS |
| | | | KLTVDKSRWQQGNVFSCSVMHEALHNHYTQKSLSLSPGKGGGGSGGGGSGGGGSGGGG |
| | | | SGGGGSGGGGSDKTHTCPPCPAPELLGGPSVFLFPPKPKDTLMISRTPEVTCVVVDVS |
| | | | HEDPEVKFNWYVDGVEVHNAKTKPCEEQYGSTYRCVSVLTVLHQDWLNGKEYKCKVSN |
| | | | KALPAPIEKTISKAKGQPREPQVYTLPPSREEMTKNQVSLTCLVKGFYPSDIAVEWES |
| | | | NGQPENNYKTTPPVLDSDGSFFLYSKLTVDKSRWQQGNVFSCSVMHEALHNHYTQKSL |
| | | | SLSPGK |
| 2125 | CD19 97- | artificial | DIVMTQSPLSLPVISGEPASISCRSSQSLLHKNAFNYLDWYLQKPGQSPQLLIYLGSN |
| | G1RE-C2 LH | | RASGVPDRFSGSGSGTDFTLKISRVEAEDVGVYYCMQALQTPFTFGCGTKVDIKGGGG |
| | CC x I2M2 x | | SGGGGSGGGGSQVQLVESGGGVVQPGRSLRLSCAASGFTFSSYGMHWVRQAPGKCLEW |
| | scFc-Full | | VAVISYEGSNKYYAESVKGRFTISRDNSKNTLYLQMNSLRDEDTAVYYCARDRGTIFG |
| | Sequence | | NYGLEVWGQGTTVTVSSSGGGGSEVQLVESGGGLVQPGGSLKLSCAASGFTENKYAIN |
| | | | WVREAPGKGLEWVARIRSKYNNYATYYADAVKDRFTISRDDSKNTAYLQMNNLKTEDT |
| | | | AVYYCVRNANFGTSYISYFAYWGQGTLVTVSSGGGGSGGGGSGGGGSQTVVTQEPSLT |
| | | | VSPGGTVTLTCGSSTGAVTSGNYPNWVQKKPGQAPRGLIGGTKFLAPGTPARFSGSLL |
| | | | GGKAALTLSGVQPEDEAEYYCVLWYSNRWVFGSGTKLTVLGGGGDKTHTCPPCPAPEL |
| | | | LGGPSVFLFPPKPKDTLMISRTPEVTCVVVDVSHEDPEVKENWYVDGVEVHNAKTKPC |
| | | | EEQYGSTYRCVSVLTVLHQDWLNGKEYKCKVSNKALPAPIEKTISKAKGQPREPQVYT |
| | | | LPPSREEMTKNQVSLTCLVKGFYPSDIAVEWESNGQPENNYKTTPPVLDSDGSFFLYS |
| | | | KLTVDKSRWQQGNVFSCSVMHEALHNHYTQKSLSLSPGKGGGGSGGGGSGGGGSGGGG |
| | | | SGGGGSGGGGSDKTHTCPPCPAPELLGGPSVFLFPPKPKDTLMISRTPEVTCVVVDVS |
| | | | HEDPEVKFNWYVDGVEVHNAKTKPCEEQYGSTYRCVSVLTVLHQDWLNGKEYKCKVSN |
| | | | KALPAPIEKTISKAKGQPREPQVYTLPPSREEMTKNQVSLTCLVKGFYPSDIAVEWES |
| | | | NGQPENNYKTTPPVLDSDGSFFLYSKLTVDKSRWQQGNVFSCSVMHEALHNHYTQKSL |
| | | | SLSPGK |
| 2126 | CD20 99-E5 | artificial | SYWMH |
| | CC-HCDR1 | | |
| 2127 | CD20 99-E5 | artificial | YITPSTGYTEYNQKFKG |
| | CC-HCDR2 | | |
| 2128 | CD20 99-E5 | artificial | VHDYDRAMEY |
| | CC-HCDR3 | | |
| 2129 | CD20 99-E5 | artificial | KASQDINKYIA |
| | CC-LCDR1 | | |
| 2130 | CD20 99-E5 | artificial | YTSTLQP |
| | CC-LCDR2 | | |
| 2131 | CD20 99-E5 | artificial | LQYASYPFT |
| | CC-LCDR3 | | |
| 2132 | CD20 99-E5 | artificial | QVQLVQSGAEVKKPGASVKVSCKASGYTFTSYWMHWVRQAPGQCLEWIGYITPSTGYT |
| | CC-VH | | EYNQKFKGRVTMTRDKSTSTVYMELSSLTSEDTAVYYCARVHDYDRAMEYWGQGTTVT |
| | | | VSS |
| 2133 | CD20 99-E5 | artificial | DIQMTQSPSSLSASVGDRVTITCKASQDINKYIAWYQQKPGKGPKLLIYYTSTLQPGV |
| | CC-VL | | PSRFSGSGSGTDFTFTISSLQPEDIATYYCLQYASYPFTFGCGTRLEIK |
| 2134 | CD20 99-E5 | artificial | EIQMTQSPSSLSASVGDRVTITCKASQDINKYIAWYQQKPGKGPKLLIYYTSTLQPGV |
| | CC EI GQ- | | PSRFSGSGSGTDFTFTISSLQPEDIATYYCLQYASYPFTFGCGTRLEIK |
| | VL | | |
| 2135 | CD20 99-E5 | artificial | QVQLVQSGAEVKKPGASVKVSCKASGYTFTSYWMHWVRQAPGQCLEWIGYITPSTGYT |
| | CC x I2C x | | EYNQKFKGRVTMTRDKSTSTVYMELSSLTSEDTAVYYCARVHDYDRAMEYWGQGTTVT |
| | scFc-Full | | VSSGGGGSGGGGSGGGGSDIQMTQSPSSLSASVGDRVTITCKASQDINKYIAWYQQKP |
| | Sequence | | GKGPKLLIYYTSTLQPGVPSRFSGSGSGTDFTFTISSLQPEDIATYYCLQYASYPFTF |
| | | | GCGTRLEIKSGGGGSEVQLVESGGGLVQPGGSLKLSCAASGFTENKYAMNWVRQAPGK |
| | | | GLEWVARIRSKYNNYATYYADSVKDRFTISRDDSKNTAYLQMNNLKTEDTAVYYCVRH |
| | | | GNFGNSYISYWAYWGQGTLVTVSSGGGGSGGGGSGGGGSQTVVTQEPSLTVSPGGTVT |
| | | | LTCGSSTGAVTSGNYPNWVQQKPGQAPRGLIGGTKFLAPGTPARFSGSLLGGKAALTL |
| | | | SGVQPEDEAEYYCVLWYSNRWVFGGGTKLTVLGGGGDKTHTCPPCPAPELLGGPSVFL |
| | | | FPPKPKDTLMISRTPEVTCVVVDVSHEDPEVKFNWYVDGVEVHNAKTKPCEEQYGSTY |
| | | | RCVSVLTVLHQDWLNGKEYKCKVSNKALPAPIEKTISKAKGQPREPQVYTLPPSREEM |
| | | | TKNQVSLTCLVKGFYPSDIAVEWESNGQPENNYKTTPPVLDSDGSFFLYSKLTVDKSR |
| | | | WQQGNVFSCSVMHEALHNHYTQKSLSLSPGKGGGGSGGGGSGGGGSGGGGSGGGGSGG |
| | | | GGSDKTHTCPPCPAPELLGGPSVFLFPPKPKDTLMISRTPEVTCVVVDVSHEDPEVKF |
| | | | NWYVDGVEVHNAKTKPCEEQYGSTYRCVSVLTVLHQDWLNGKEYKCKVSNKALPAPIE |
| | | | KTISKAKGQPREPQVYTLPPSREEMTKNQVSLTCLVKGFYPSDIAVEWESNGQPENNY |
| | | | KTTPPVLDSDGSFFLYSKLTVDKSRWQQGNVFSCSVMHEALHNHYTQKSLSLSPGK |
| 2136 | CD20 99-E5 | artificial | QVQLVQSGAEVKKPGASVKVSCKASGYTFTSYWMHWVRQAPGQCLEWIGYITPSTGYT |
| | CC x I2E X | | EYNQKFKGRVTMTRDKSTSTVYMELSSLTSEDTAVYYCARVHDYDRAMEYWGQGTTVT |
| | scFc-Full | | VSSGGGGSGGGGSGGGGSDIQMTQSPSSLSASVGDRVTITCKASQDINKYIAWYQQKP |
| | Sequence | | GKGPKLLIYYTSTLQPGVPSRFSGSGSGTDFTFTISSLQPEDIATYYCLQYASYPFTF |
| | | | GCGTRLEIKSGGGGSEVQLVESGGGLVQPGGSLKLSCAASGFTENKYAINWVRQAPGK |
| | | | GLEWVARIRSKYNNYATYYADAVKDRFTISRDDSKNTVYLQMNNLKTEDTAVYYCARA |
| | | | GNFGSSYISYWAYWGQGTLVTVSSGGGGSGGGGSGGGGSQTVVTQEPSLTVSPGGTVT |
| | | | ITCGSSTGAVTSGNYPNWVQKKPGQAPRGLIGGTKFLAPGTPARFSGSLSGGKAALTL |
| | | | SGVQPEDEAEYYCVLWYSNRWVFGSGTKLTVLGGGGDKTHTCPPCPAPELLGGPSVFL |
| | | | FPPKPKDTLMISRTPEVTCVVVDVSHEDPEVKFNWYVDGVEVHNAKTKPCEEQYGSTY |
| | | | RCVSVLTVLHQDWLNGKEYKCKVSNKALPAPIEKTISKAKGQPREPQVYTLPPSREEM |
| | | | TKNQVSLTCLVKGFYPSDIAVEWESNGQPENNYKTTPPVLDSDGSFFLYSKLTVDKSR |
| | | | WQQGNVFSCSVMHEALHNHYTQKSLSLSPGKGGGGSGGGGSGGGGSGGGGSGGGGSGG |
| | | | GGSDKTHTCPPCPAPELLGGPSVFLFPPKPKDTLMISRTPEVTCVVVDVSHEDPEVKF |
| | | | NWYVDGVEVHNAKTKPCEEQYGSTYRCVSVLTVLHQDWLNGKEYKCKVSNKALPAPIE |
| | | | KTISKAKGQPREPQVYTLPPSREEMTKNQVSLTCLVKGFYPSDIAVEWESNGQPENNY |
| | | | KTTPPVLDSDGSFFLYSKLTVDKSRWQQGNVFSCSVMHEALHNHYTQKSLSLSPGK |
| 2137 | CD20 99-E5 | artificial | QVQLVQSGAEVKKPGASVKVSCKASGYTFTSYWMHWVRQAPGQCLEWIGYITPSTGYT |
| | CC x I2K x | | EYNQKFKGRVTMTRDKSTSTVYMELSSLTSEDTAVYYCARVHDYDRAMEYWGQGTTVT |
| | scFc-Full | | VSSGGGGSGGGGSGGGGSDIQMTQSPSSLSASVGDRVTITCKASQDINKYIAWYQQKP |
| | Sequence | | GKGPKLLIYYTSTLQPGVPSRFSGSGSGTDFTFTISSLQPEDIATYYCLQYASYPFTF |
| | | | GCGTRLEIKSGGGGSEVQLVESGGGLVQPGGSLKLSCAASGFTFNKYAMNWVRQAPGK |
| | | | GLEWVARIRSKYNNYATYYAEAVKGRFTISRDDSKNTVYLQMNNLKTEDTAVYYCVRN |
| | | | ENIGTSYISYWAYWGQGTLVTVSSGGGGSGGGGSGGGGSQTVVTQEPSLTVSPGGTVT |
| | | | ITCGSSTGAVTSGNYPNWVQQKPGQAPRGLIGGTKFLAPGTPARFSGSLSGGKAALTL |
| | | | SGVQPEDEAEYYCVLWYSNRWVFGSGTKLTVLGGGGDKTHTCPPCPAPELLGGPSVFL |
| | | | FPPKPKDTLMISRTPEVTCVVVDVSHEDPEVKFNWYVDGVEVHNAKTKPCEEQYGSTY |
| | | | RCVSVLTVLHQDWLNGKEYKCKVSNKALPAPIEKTISKAKGQPREPQVYTLPPSREEM |
| | | | TKNQVSLTCLVKGFYPSDIAVEWESNGQPENNYKTTPPVLDSDGSFFLYSKLTVDKSR |
| | | | WQQGNVFSCSVMHEALHNHYTQKSLSLSPGKGGGGSGGGGSGGGGSGGGGSGGGGSGG |
| | | | GGSDKTHTCPPCPAPELLGGPSVFLFPPKPKDTLMISRTPEVTCVVVDVSHEDPEVKF |
| | | | NWYVDGVEVHNAKTKPCEEQYGSTYRCVSVLTVLHQDWLNGKEYKCKVSNKALPAPIE |
| | | | KTISKAKGQPREPQVYTLPPSREEMTKNQVSLTCLVKGFYPSDIAVEWESNGQPENNY |
| | | | KTTPPVLDSDGSFFLYSKLTVDKSRWQQGNVFSCSVMHEALHNHYTQKSLSLSPGK |
| 2138 | CD20 99-E5 | artificial | QVQLVQSGAEVKKPGASVKVSCKASGYTFTSYWMHWVRQAPGQCLEWIGYITPSTGYT |
| | CC x I2L x | | EYNQKFKGRVTMTRDKSTSTVYMELSSLTSEDTAVYYCARVHDYDRAMEYWGQGTTVT |
| | scFc-Full | | VSSGGGGSGGGGSGGGGSDIQMTQSPSSLSASVGDRVTITCKASQDINKYIAWYQQKP |
| | Sequence | | GKGPKLLIYYTSTLQPGVPSRFSGSGSGTDFTFTISSLQPEDIATYYCLQYASYPFTF |
| | | | GCGTRLEIKSGGGGSEVQLVESGGGLVQPGGSLKLSCAASGFTENKYAMNWVRQAPGK |
| | | | GMEWVARIRSKYNNYATYYADAVKDRFTISRDDSKNTLYLQMNNLKTEDTAVYYCVRA |
| | | | GNFGSSYISYFAYWGQGTLVTVSSGGGGSGGGGSGGGGSQTVVTQEPSLTVSPGGTVT |
| | | | ITCGSSTGAVTSGNYPNWIQKKPGQAPRGLIGGTKFLAPGTPARFSGSLEGGKAALTL |
| | | | SGVQPEDEAEYYCVLYYSNRWVFGSGTKLTVLGGGGDKTHTCPPCPAPELLGGPSVFL |
| | | | FPPKPKDTLMISRTPEVTCVVVDVSHEDPEVKENWYVDGVEVHNAKTKPCEEQYGSTY |
| | | | RCVSVLTVLHQDWLNGKEYKCKVSNKALPAPIEKTISKAKGQPREPQVYTLPPSREEM |
| | | | TKNQVSLTCLVKGFYPSDIAVEWESNGQPENNYKTTPPVLDSDGSFFLYSKLTVDKSR |
| | | | WQQGNVFSCSVMHEALHNHYTQKSLSLSPGKGGGGSGGGGSGGGGSGGGGSGGGGSGG |
| | | | GGSDKTHTCPPCPAPELLGGPSVFLFPPKPKDTLMISRTPEVTCVVVDVSHEDPEVKF |
| | | | NWYVDGVEVHNAKTKPCEEQYGSTYRCVSVLTVLHQDWLNGKEYKCKVSNKALPAPIE |
| | | | KTISKAKGQPREPQVYTLPPSREEMTKNQVSLTCLVKGFYPSDIAVEWESNGQPENNY |
| | | | KTTPPVLDSDGSFFLYSKLTVDKSRWQQGNVFSCSVMHEALHNHYTQKSLSLSPGK |
| | | | QVQLVQSGAEVKKPGASVKVSCKASGYTFTSYWMHWVRQAPGQCLEWIGYITPSTGYT |
| 2139 | CD20 99-E5 | artificial | EYNQKFKGRVTMTRDKSTSTVYMELSSLTSEDTAVYYCARVHDYDRAMEYWGQGTTVT |
| | CC x I2M X | | VSSGGGGSGGGGSGGGGSDIQMTQSPSSLSASVGDRVTITCKASQDINKYIAWYQQKP |
| | scFc-Full | | GKGPKLLIYYTSTLQPGVPSRFSGSGSGTDFTFTISSLQPEDIATYYCLQYASYPFTF |
| | Sequence | | GCGTRLEIKSGGGGSEVQLVESGGGLVQPGGSLKLSCAASGFTFNKYAMNWVRQAPGK |
| | | | GMEWVARIRSKYNNYATYYADAVKDRFTISRDDSKNTLYLQMNNLKTEDTAVYYCVRA |
| | | | GNFGTSYISYWAYWGQGTLVTVSSGGGGSGGGGSGGGGSQTVVTQEPSLTVSPGGTVT |
| | | | ITCGSSTGAVTSGNYPNWVQKKPGQAPRGLIGGTKFLAPGTPARFSGSLSGGKAALTL |
| | | | SGVQPEDEAEYYCVLWYSNRWVFGSGTKLTVLGGGGDKTHTCPPCPAPELLGGPSVEL |
| | | | FPPKPKDTLMISRTPEVTCVVVDVSHEDPEVKFNWYVDGVEVHNAKTKPCEEQYGSTY |
| | | | RCVSVLTVLHQDWLNGKEYKCKVSNKALPAPIEKTISKAKGQPREPQVYTLPPSREEM |
| | | | TKNQVSLTCLVKGFYPSDIAVEWESNGQPENNYKTTPPVLDSDGSFFLYSKLTVDKSR |
| | | | WQQGNVFSCSVMHEALHNHYTQKSLSLSPGKGGGGSGGGGSGGGGSGGGGSGGGGSGG |
| | | | GGSDKTHTCPPCPAPELLGGPSVFLFPPKPKDTLMISRTPEVTCVVVDVSHEDPEVKF |
| | | | NWYVDGVEVHNAKTKPCEEQYGSTYRCVSVLTVLHQDWLNGKEYKCKVSNKALPAPIE |
| | | | KTISKAKGQPREPQVYTLPPSREEMTKNQVSLTCLVKGFYPSDIAVEWESNGQPENNY |
| | | | KTTPPVLDSDGSFFLYSKLTVDKSRWQQGNVFSCSVMHEALHNHYTQKSLSLSPGK |
| 2140 | CD20 99-E5 | artificial | QVQLVQSGAEVKKPGASVKVSCKASGYTFTSYWMHWVRQAPGQCLEWIGYITPSTGYT |
| | CC x I2M2 x | | EYNQKFKGRVTMTRDKSTSTVYMELSSLTSEDTAVYYCARVHDYDRAMEYWGQGTTVT |
| | scFc-Full | | VSSGGGGSGGGGSGGGGSDIQMTQSPSSLSASVGDRVTITCKASQDINKYIAWYQQKP |
| | Sequence | | GKGPKLLIYYTSTLQPGVPSRFSGSGSGTDFTFTISSLQPEDIATYYCLQYASYPFTF |
| | | | GCGTRLEIKSGGGGSEVQLVESGGGLVQPGGSLKLSCAASGFTFNKYAINWVREAPGK |
| | | | GLEWVARIRSKYNNYATYYADAVKDRFTISRDDSKNTAYLQMNNLKTEDTAVYYCVRN |
| | | | ANFGTSYISYFAYWGQGTLVTVSSGGGGSGGGGSGGGGSQTVVTQEPSLTVSPGGTVT |
| | | | LTCGSSTGAVTSGNYPNWVQKKPGQAPRGLIGGTKFLAPGTPARFSGSLLGGKAALTL |
| | | | SGVQPEDEAEYYCVLWYSNRWVFGSGTKLTVLGGGGDKTHTCPPCPAPELLGGPSVFL |
| | | | FPPKPKDTLMISRTPEVTCVVVDVSHEDPEVKFNWYVDGVEVHNAKTKPCEEQYGSTY |
| | | | RCVSVLTVLHQDWLNGKEYKCKVSNKALPAPIEKTISKAKGQPREPQVYTLPPSREEM |
| | | | TKNQVSLTCLVKGFYPSDIAVEWESNGQPENNYKTTPPVLDSDGSFFLYSKLTVDKSR |
| | | | WQQGNVFSCSVMHEALHNHYTQKSLSLSPGKGGGGSGGGGSGGGGSGGGGSGGGGSGG |
| | | | GGSDKTHTCPPCPAPELLGGPSVFLFPPKPKDTLMISRTPEVTCVVVDVSHEDPEVKE |
| | | | NWYVDGVEVHNAKTKPCEEQYGSTYRCVSVLTVLHQDWLNGKEYKCKVSNKALPAPIE |
| | | | KTISKAKGQPREPQVYTLPPSREEMTKNQVSLTCLVKGFYPSDIAVEWESNGQPENNY |
| | | | KTTPPVLDSDGSFFLYSKLTVDKSRWQQGNVFSCSVMHEALHNHYTQKSLSLSPGK |
| 2141 | CD22 28- | artificial | SYGIS |
| | B7N65S CC- | | |
| | HCDR1 | | |
| 2142 | CD22 28- | artificial | WISAYSGNAIYAQKLQG |
| | B7N65S CC- | | |
| | HCDR2 | | |
| 2143 | CD22 28- | artificial | DPDYYGSGSYSDY |
| | B7N65S CC- | | |
| | HCDR3 | | |
| 2144 | CD22 28- | artificial | RASQSVSSNLA |
| | B7N65S CC- | | |
| | LCDR1 | | |
| 2145 | CD22 28- | artificial | GASSRAT |
| | B7N65S CC- | | |
| | LCDR2 | | |
| 2146 | CD22 28- | artificial | QQYHSWPLLT |
| | B7N65S CC- | | |
| | LCDR3 | | |
| 2147 | CD22 28- | artificial | QVQLVQSGAEVKKPGASVKVSCKASGYTFTSYGISWVRQAPGQCLEWMGWISAYSGNA |
| | B7N65S CC- | | IYAQKLQGRVTMTRDTSTSTAYMELRSLRSDDTAVYYCARDPDYYGSGSYSDYWGQGT |
| | VH | | LVTVSS |
| 2148 | CD22 28- | artificial | EIVLTQSPATLSVSPGERATLSCRASQSVSSNLAWYQQKPGQAPRLLIYGASSRATGI |
| | B7N65S CC- | | PARFSGSGSGTEFTLTISSLQSEDFAVYYCQQYHSWPLLTFGCGTKVEIK |
| | VL | | |
| 2149 | CD22 28-B7 | artificial | QVQLVQSGAEVKKPGASVKVSCKASGYTFTSYGISWVRQAPGQCLEWMGWISAYSGNA |
| | N65S CC X | | IYAQKLQGRVTMTRDTSTSTAYMELRSLRSDDTAVYYCARDPDYYGSGSYSDYWGQGT |
| | I2C x scFc | | LVTVSSGGGGSGGGGSGGGGSEIVLTQSPATLSVSPGERATLSCRASQSVSSNLAWYQ |
| | -Full | | QKPGQAPRLLIYGASSRATGIPARFSGSGSGTEFTLTISSLQSEDFAVYYCQQYHSWP |
| | Sequence | | LLTFGCGTKVEIKSGGGGSEVQLVESGGGLVQPGGSLKLSCAASGFTFNKYAMNWVRQ |
| | | | APGKGLEWVARIRSKYNNYATYYADSVKDRFTISRDDSKNTAYLQMNNLKTEDTAVYY |
| | | | CVRHGNFGNSYISYWAYWGQGTLVTVSSGGGGSGGGGSGGGGSQTVVTQEPSLTVSPG |
| | | | GTVTLTCGSSTGAVTSGNYPNWVQQKPGQAPRGLIGGTKFLAPGTPARFSGSLLGGKA |
| | | | ALTLSGVQPEDEAEYYCVLWYSNRWVFGGGTKLTVLGGGGDKTHTCPPCPAPELLGGP |
| | | | SVFLFPPKPKDTLMISRTPEVTCVVVDVSHEDPEVKFNWYVDGVEVHNAKTKPCEEQY |
| | | | GSTYRCVSVLTVLHQDWLNGKEYKCKVSNKALPAPIEKTISKAKGQPREPQVYTLPPS |
| | | | REEMTKNQVSLTCLVKGFYPSDIAVEWESNGQPENNYKTTPPVLDSDGSFFLYSKLTV |
| | | | DKSRWQQGNVFSCSVMHEALHNHYTQKSLSLSPGKGGGGSGGGGSGGGGSGGGGSGGG |
| | | | GSGGGGSDKTHTCPPCPAPELLGGPSVFLFPPKPKDTLMISRTPEVTCVVVDVSHEDP |
| | | | EVKFNWYVDGVEVHNAKTKPCEEQYGSTYRCVSVLTVLHQDWLNGKEYKCKVSNKALP |
| | | | APIEKTISKAKGQPREPQVYTLPPSREEMTKNQVSLTCLVKGFYPSDIAVEWESNGQP |
| | | | ENNYKTTPPVLDSDGSFFLYSKLTVDKSRWQQGNVFSCSVMHEALHNHYTQKSLSLSP |
| | | | GK |
| 2150 | CD22 28-B7 | artificial | QVQLVQSGAEVKKPGASVKVSCKASGYTFTSYGISWVRQAPGQCLEWMGWISAYSGNA |
| | N65S CC X | | IYAQKLQGRVTMTRDTSTSTAYMELRSLRSDDTAVYYCARDPDYYGSGSYSDYWGQGT |
| | I2E x scFc | | LVTVSSGGGGSGGGGSGGGGSEIVLTQSPATLSVSPGERATLSCRASQSVSSNLAWYQ |
| | -Full | | QKPGQAPRLLIYGASSRATGIPARFSGSGSGTEFTLTISSLQSEDFAVYYCQQYHSWP |
| | Sequence | | LLTFGCGTKVEIKSGGGGSEVQLVESGGGLVQPGGSLKLSCAASGFTENKYAINWVRQ |
| | | | APGKGLEWVARIRSKYNNYATYYADAVKDRFTISRDDSKNTVYLQMNNLKTEDTAVYY |
| | | | CARAGNFGSSYISYWAYWGQGTLVTVSSGGGGSGGGGSGGGGSQTVVTQEPSLTVSPG |
| | | | GTVTITCGSSTGAVTSGNYPNWVQKKPGQAPRGLIGGTKFLAPGTPARFSGSLSGGKA |
| | | | ALTLSGVQPEDEAEYYCVLWYSNRWVFGSGTKLTVLGGGGDKTHTCPPCPAPELLGGP |
| | | | SVFLFPPKPKDTLMISRTPEVTCVVVDVSHEDPEVKFNWYVDGVEVHNAKTKPCEEQY |
| | | | GSTYRCVSVLTVLHQDWLNGKEYKCKVSNKALPAPIEKTISKAKGQPREPQVYTLPPS |
| | | | REEMTKNQVSLTCLVKGFYPSDIAVEWESNGQPENNYKTTPPVLDSDGSFFLYSKLTV |
| | | | DKSRWQQGNVFSCSVMHEALHNHYTQKSLSLSPGKGGGGSGGGGSGGGGSGGGGSGGG |
| | | | GSGGGGSDKTHTCPPCPAPELLGGPSVFLFPPKPKDTLMISRTPEVTCVVVDVSHEDP |
| | | | EVKFNWYVDGVEVHNAKTKPCEEQYGSTYRCVSVLTVLHQDWLNGKEYKCKVSNKALP |
| | | | APIEKTISKAKGQPREPQVYTLPPSREEMTKNQVSLTCLVKGFYPSDIAVEWESNGQP |
| | | | ENNYKTTPPVLDSDGSFFLYSKLTVDKSRWQQGNVFSCSVMHEALHNHYTQKSLSLSP |
| | | | GK |
| 2151 | CD22 28-B7 | artificial | QVQLVQSGAEVKKPGASVKVSCKASGYTFTSYGISWVRQAPGQCLEWMGWISAYSGNA |
| | N65S CC X | | IYAQKLQGRVTMTRDTSTSTAYMELRSLRSDDTAVYYCARDPDYYGSGSYSDYWGQGT |
| | I2K x scFc | | LVTVSSGGGGSGGGGSGGGGSEIVLTQSPATLSVSPGERATLSCRASQSVSSNLAWYQ |
| | -Full | | QKPGQAPRLLIYGASSRATGIPARFSGSGSGTEFTLTISSLQSEDFAVYYCQQYHSWP |
| | Sequence | | LLTFGCGTKVEIKSGGGGSEVQLVESGGGLVQPGGSLKLSCAASGFTFNKYAMNWVRQ |
| | | | APGKGLEWVARIRSKYNNYATYYAEAVKGRFTISRDDSKNTVYLQMNNLKTEDTAVYY |
| | | | CVRNENIGTSYISYWAYWGQGTLVTVSSGGGGSGGGGSGGGGSQTVVTQEPSLTVSPG |
| | | | GTVTITCGSSTGAVTSGNYPNWVQQKPGQAPRGLIGGTKFLAPGTPARFSGSLSGGKA |
| | | | ALTLSGVQPEDEAEYYCVLWYSNRWVFGSGTKLTVLGGGGDKTHTCPPCPAPELLGGP |
| | | | SVFLFPPKPKDTLMISRTPEVTCVVVDVSHEDPEVKFNWYVDGVEVHNAKTKPCEEQY |
| | | | GSTYRCVSVLTVLHQDWLNGKEYKCKVSNKALPAPIEKTISKAKGQPREPQVYTLPPS |
| | | | REEMTKNQVSLTCLVKGFYPSDIAVEWESNGQPENNYKTTPPVLDSDGSFFLYSKLTV |
| | | | DKSRWQQGNVFSCSVMHEALHNHYTQKSLSLSPGKGGGGSGGGGSGGGGSGGGGSGGG |
| | | | GSGGGGSDKTHTCPPCPAPELLGGPSVFLFPPKPKDTLMISRTPEVTCVVVDVSHEDP |
| | | | EVKFNWYVDGVEVHNAKTKPCEEQYGSTYRCVSVLTVLHQDWLNGKEYKCKVSNKALP |
| | | | APIEKTISKAKGQPREPQVYTLPPSREEMTKNQVSLTCLVKGFYPSDIAVEWESNGQP |
| | | | ENNYKTTPPVLDSDGSFFLYSKLTVDKSRWQQGNVFSCSVMHEALHNHYTQKSLSLSP |
| | | | GK |
| 2152 | CD22 28-B7 | artificial | QVQLVQSGAEVKKPGASVKVSCKASGYTFTSYGISWVRQAPGQCLEWMGWISAYSGNA |
| | N65S CC X | | IYAQKLQGRVTMTRDTSTSTAYMELRSLRSDDTAVYYCARDPDYYGSGSYSDYWGQGT |
| | I2L x scFc | | LVTVSSGGGGSGGGGSGGGGSEIVLTQSPATLSVSPGERATLSCRASQSVSSNLAWYQ |
| | -Full | | QKPGQAPRLLIYGASSRATGIPARFSGSGSGTEFTLTISSLQSEDFAVYYCQQYHSWP |
| | Sequence | | LLTFGCGTKVEIKSGGGGSEVQLVESGGGLVQPGGSLKLSCAASGFTENKYAMNWVRQ |
| | | | APGKGMEWVARIRSKYNNYATYYADAVKDRFTISRDDSKNTLYLQMNNLKTEDTAVYY |
| | | | CVRAGNFGSSYISYFAYWGQGTLVTVSSGGGGSGGGGSGGGGSQTVVTQEPSLTVSPG |
| | | | GTVTITCGSSTGAVTSGNYPNWIQKKPGQAPRGLIGGTKFLAPGTPARFSGSLEGGKA |
| | | | ALTLSGVQPEDEAEYYCVLYYSNRWVFGSGTKLTVLGGGGDKTHTCPPCPAPELLGGP |
| | | | SVFLFPPKPKDTLMISRTPEVTCVVVDVSHEDPEVKENWYVDGVEVHNAKTKPCEEQY |
| | | | GSTYRCVSVLTVLHQDWLNGKEYKCKVSNKALPAPIEKTISKAKGQPREPQVYTLPPS |
| | | | REEMTKNQVSLTCLVKGFYPSDIAVEWESNGQPENNYKTTPPVLDSDGSFFLYSKLTV |
| | | | DKSRWQQGNVFSCSVMHEALHNHYTQKSLSLSPGKGGGGSGGGGSGGGGSGGGGSGGG |
| | | | GSGGGGSDKTHTCPPCPAPELLGGPSVFLFPPKPKDTLMISRTPEVTCVVVDVSHEDP |
| | | | EVKFNWYVDGVEVHNAKTKPCEEQYGSTYRCVSVLTVLHQDWLNGKEYKCKVSNKALP |
| | | | APIEKTISKAKGQPREPQVYTLPPSREEMTKNQVSLTCLVKGFYPSDIAVEWESNGQP |
| | | | ENNYKTTPPVLDSDGSFFLYSKLTVDKSRWQQGNVFSCSVMHEALHNHYTQKSLSLSP |
| | | | GK |
| 2153 | CD22 28-B7 | artificial | QVQLVQSGAEVKKPGASVKVSCKASGYTFTSYGISWVRQAPGQCLEWMGWISAYSGNA |
| | N65S CC X | | IYAQKLQGRVTMTRDTSTSTAYMELRSLRSDDTAVYYCARDPDYYGSGSYSDYWGQGT |
| | I2M x scFc | | LVTVSSGGGGSGGGGSGGGGSEIVLTQSPATLSVSPGERATLSCRASQSVSSNLAWYQ |
| | -Full | | QKPGQAPRLLIYGASSRATGIPARFSGSGSGTEFTLTISSLQSEDFAVYYCQQYHSWP |
| | Sequence | | LLTFGCGTKVEIKSGGGGSEVQLVESGGGLVQPGGSLKLSCAASGFTFNKYAMNWVRQ |
| | | | APGKGMEWVARIRSKYNNYATYYADAVKDRFTISRDDSKNTLYLQMNNLKTEDTAVYY |
| | | | CVRAGNFGTSYISYWAYWGQGTLVTVSSGGGGSGGGGSGGGGSQTVVTQEPSLTVSPG |
| | | | GTVTITCGSSTGAVTSGNYPNWVQKKPGQAPRGLIGGTKFLAPGTPARFSGSLSGGKA |
| | | | ALTLSGVQPEDEAEYYCVLWYSNRWVFGSGTKLTVLGGGGDKTHTCPPCPAPELLGGP |
| | | | SVFLFPPKPKDTLMISRTPEVTCVVVDVSHEDPEVKENWYVDGVEVHNAKTKPCEEQY |
| | | | GSTYRCVSVLTVLHQDWLNGKEYKCKVSNKALPAPIEKTISKAKGQPREPQVYTLPPS |
| | | | REEMTKNQVSLTCLVKGFYPSDIAVEWESNGQPENNYKTTPPVLDSDGSFFLYSKLTV |
| | | | DKSRWQQGNVFSCSVMHEALHNHYTQKSLSLSPGKGGGGSGGGGSGGGGSGGGGSGGG |
| | | | GSGGGGSDKTHTCPPCPAPELLGGPSVFLFPPKPKDTLMISRTPEVTCVVVDVSHEDP |
| | | | EVKFNWYVDGVEVHNAKTKPCEEQYGSTYRCVSVLTVLHQDWLNGKEYKCKVSNKALP |
| | | | APIEKTISKAKGQPREPQVYTLPPSREEMTKNQVSLTCLVKGFYPSDIAVEWESNGQP |
| | | | ENNYKTTPPVLDSDGSFFLYSKLTVDKSRWQQGNVFSCSVMHEALHNHYTQKSLSLSP |
| | | | GK |
| 2154 | CD22 28-B7 | artificial | QVQLVQSGAEVKKPGASVKVSCKASGYTFTSYGISWVRQAPGQCLEWMGWISAYSGNA |
| | N65S CC X | | IYAQKLQGRVTMTRDTSTSTAYMELRSLRSDDTAVYYCARDPDYYGSGSYSDYWGQGT |
| | I2M2 x scFc | | LVTVSSGGGGSGGGGSGGGGSEIVLTQSPATLSVSPGERATLSCRASQSVSSNLAWYQ |
| | -Full | | QKPGQAPRLLIYGASSRATGIPARFSGSGSGTEFTLTISSLQSEDFAVYYCQQYHSWP |
| | Sequence | | LLTFGCGTKVEIKSGGGGSEVQLVESGGGLVQPGGSLKLSCAASGFTENKYAINWVRE |
| | | | APGKGLEWVARIRSKYNNYATYYADAVKDRFTISRDDSKNTAYLQMNNLKTEDTAVYY |
| | | | CVRNANFGTSYISYFAYWGQGTLVTVSSGGGGSGGGGSGGGGSQTVVTQEPSLTVSPG |
| | | | GTVTLTCGSSTGAVTSGNYPNWVQKKPGQAPRGLIGGTKFLAPGTPARFSGSLLGGKA |
| | | | ALTLSGVQPEDEAEYYCVLWYSNRWVFGSGTKLTVLGGGGDKTHTCPPCPAPELLGGP |
| | | | SVFLFPPKPKDTLMISRTPEVTCVVVDVSHEDPEVKFNWYVDGVEVHNAKTKPCEEQY |
| | | | GSTYRCVSVLTVLHQDWLNGKEYKCKVSNKALPAPIEKTISKAKGQPREPQVYTLPPS |
| | | | REEMTKNQVSLTCLVKGFYPSDIAVEWESNGQPENNYKTTPPVLDSDGSFFLYSKLTV |
| | | | DKSRWQQGNVFSCSVMHEALHNHYTQKSLSLSPGKGGGGSGGGGSGGGGSGGGGSGGG |
| | | | GSGGGGSDKTHTCPPCPAPELLGGPSVFLFPPKPKDTLMISRTPEVTCVVVDVSHEDP |
| | | | EVKFNWYVDGVEVHNAKTKPCEEQYGSTYRCVSVLTVLHQDWLNGKEYKCKVSNKALP |
| | | | APIEKTISKAKGQPREPQVYTLPPSREEMTKNQVSLTCLVKGFYPSDIAVEWESNGQP |
| | | | ENNYKTTPPVLDSDGSFFLYSKLTVDKSRWQQGNVFSCSVMHEALHNHYTQKSLSLSP |
| | | | GK |
| 2155 | CD33 E11- | artificial | NYGMN |
| | HCDR1 | | |
| 2156 | CD33 E11- | artificial | WINTYTGEPTYADKFQG |
| | HCDR2 | | |
| 2157 | CD33 E11- | artificial | WSWSDGYYVYFDY |
| | HCDR3 | | |
| 2158 | CD33 E11- | artificial | KSSQSVLDSSTNKNSLA |
| | LCDR1 | | |
| 2159 | CD33 E11- | artificial | WASTRES |
| | LCDR2 | | |
| 2160 | CD33 E11- | artificial | QQSAHFPIT |
| | LCDR3 | | |
| 2161 | CD33 E11- | artificial | QVQLVQSGAEVKKPGESVKVSCKASGYTFTNYGMNWVKQAPGQGLEWMGWINTYTGEP |
| | VH | | TYADKFQGRVTMTTDTSTSTAYMEIRNLGGDDTAVYYCARWSWSDGYYVYFDYWGQGT |
| | | | SVTVSS |
| 2162 | CD33 E11- | artificial | DIVMTQSPDSLTVSLGERTTINCKSSQSVLDSSTNKNSLAWYQQKPGQPPKLLLSWAS |
| | VL | | TRESGIPDRFSGSGSGTDFTLTIDSPQPEDSATYYCQQSAHFPITFGQGTRLEIK |
| 2163 | CD33 E11 CC | artificial | QVQLVQSGAEVKKPGESVKVSCKASGYTFTNYGMNWVKQAPGQCLEWMGWINTYTGEP |
| | -VH | | TYADKFQGRVTMTTDTSTSTAYMEIRNLGGDDTAVYYCARWSWSDGYYVYFDYWGQGT |
| | | | SVTVSS |
| 2164 | CD33 E11 CC | artificial | DIVMTQSPDSLTVSLGERTTINCKSSQSVLDSSTNKNSLAWYQQKPGQPPKLLLSWAS |
| | -VL | | TRESGIPDRFSGSGSGTDFTLTIDSPQPEDSATYYCQQSAHFPITFGCGTRLEIK |
| 2165 | CD33 E11 CC | artificial | EIVMTQSPDSLTVSLGERTTINCKSSQSVLDSSTNKNSLAWYQQKPGQPPKLLLSWAS |
| | EI GQ-VL | | TRESGIPDRFSGSGSGTDFTLTIDSPQPEDSATYYCQQSAHFPITFGCGTRLEIK |
| 2166 | CD33 E11 EI | artificial | EIVMTQSPDSLTVSLGERTTINCKSSQSVLDSSTNKNSLAWYQQKPGQPPKLLLSWAS |
| | GQ-VL | | TRESGIPDRFSGSGSGTDFTLTIDSPQPEDSATYYCQQSAHFPITFGQGTRLEIK |
| 2167 | E11 x I2C- | artificial | QVQLVQSGAEVKKPGESVKVSCKASGYTFTNYGMNWVKQAPGQGLEWMGWINTYTGEP |
| | Full | | TYADKFQGRVTMTTDTSTSTAYMEIRNLGGDDTAVYYCARWSWSDGYYVYFDYWGQGT |
| | Sequence | | SVTVSSGGGGSGGGGSGGGGSDIVMTQSPDSLTVSLGERTTINCKSSQSVLDSSTNKN |
| | | | SLAWYQQKPGQPPKLLLSWASTRESGIPDRFSGSGSGTDFTLTIDSPQPEDSATYYCQ |
| | | | QSAHFPITFGQGTRLEIKSGGGGSEVQLVESGGGLVQPGGSLKLSCAASGFTENKYAM |
| | | | NWVRQAPGKGLEWVARIRSKYNNYATYYADSVKDRFTISRDDSKNTAYLQMNNLKTED |
| | | | TAVYYCVRHGNFGNSYISYWAYWGQGTLVTVSSGGGGSGGGGSGGGGSQTVVTQEPSL |
| | | | TVSPGGTVTLTCGSSTGAVTSGNYPNWVQQKPGQAPRGLIGGTKFLAPGTPARFSGSL |
| | | | LGGKAALTLSGVQPEDEAEYYCVLWYSNRWVFGGGTKLTVL |
| 2168 | E11 x I2E- | artificial | QVQLVQSGAEVKKPGESVKVSCKASGYTFTNYGMNWVKQAPGQGLEWMGWINTYTGEP |
| | Full | | TYADKFQGRVTMTTDTSTSTAYMEIRNLGGDDTAVYYCARWSWSDGYYVYFDYWGQGT |
| | Sequence | | SVTVSSGGGGSGGGGSGGGGSDIVMTQSPDSLTVSLGERTTINCKSSQSVLDSSTNKN |
| | | | SLAWYQQKPGQPPKLLLSWASTRESGIPDRFSGSGSGTDFTLTIDSPQPEDSATYYCQ |
| | | | QSAHFPITFGQGTRLEIKSGGGGSEVQLVESGGGLVQPGGSLKLSCAASGFTFNKYAI |
| | | | NWVRQAPGKGLEWVARIRSKYNNYATYYADAVKDRFTISRDDSKNTVYLQMNNLKTED |
| | | | TAVYYCARAGNFGSSYISYWAYWGQGTLVTVSSGGGGSGGGGSGGGGSQTVVTQEPSL |
| | | | TVSPGGTVTITCGSSTGAVTSGNYPNWVQKKPGQAPRGLIGGTKFLAPGTPARFSGSL |
| | | | SGGKAALTLSGVQPEDEAEYYCVLWYSNRWVFGSGTKLTVL |
| 2169 | E11 x I2K- | artificial | QVQLVQSGAEVKKPGESVKVSCKASGYTFTNYGMNWVKQAPGQGLEWMGWINTYTGEP |
| | Full | | TYADKFQGRVTMTTDTSTSTAYMEIRNLGGDDTAVYYCARWSWSDGYYVYFDYWGQGT |
| | Sequence | | SVTVSSGGGGSGGGGSGGGGSDIVMTQSPDSLTVSLGERTTINCKSSQSVLDSSTNKN |
| | | | SLAWYQQKPGQPPKLLLSWASTRESGIPDRFSGSGSGTDFTLTIDSPQPEDSATYYCQ |
| | | | QSAHFPITFGQGTRLEIKSGGGGSEVQLVESGGGLVQPGGSLKLSCAASGFTENKYAM |
| | | | NWVRQAPGKGLEWVARIRSKYNNYATYYAEAVKGRFTISRDDSKNTVYLQMNNLKTED |
| | | | TAVYYCVRNENIGTSYISYWAYWGQGTLVTVSSGGGGSGGGGSGGGGSQTVVTQEPSL |
| | | | TVSPGGTVTITCGSSTGAVTSGNYPNWVQQKPGQAPRGLIGGTKFLAPGTPARFSGSL |
| | | | SGGKAALTLSGVQPEDEAEYYCVLWYSNRWVFGSGTKLTVL |
| 2170 | E11 x I2L- | artificial | QVQLVQSGAEVKKPGESVKVSCKASGYTFTNYGMNWVKQAPGQGLEWMGWINTYTGEP |
| | Full | | TYADKFQGRVTMTTDTSTSTAYMEIRNLGGDDTAVYYCARWSWSDGYYVYFDYWGQGT |
| | Sequence | | SVTVSSGGGGSGGGGSGGGGSDIVMTQSPDSLTVSLGERTTINCKSSQSVLDSSTNKN |
| | | | SLAWYQQKPGQPPKLLLSWASTRESGIPDRFSGSGSGTDFTLTIDSPQPEDSATYYCQ |
| | | | QSAHFPITFGQGTRLEIKSGGGGSEVQLVESGGGLVQPGGSLKLSCAASGFTENKYAM |
| | | | NWVRQAPGKGMEWVARIRSKYNNYATYYADAVKDRFTISRDDSKNTLYLQMNNLKTED |
| | | | TAVYYCVRAGNFGSSYISYFAYWGQGTLVTVSSGGGGGGGGSGGGGSQTVVTQEPSL |
| | | | TVSPGGTVTITCGSSTGAVTSGNYPNWIQKKPGQAPRGLIGGTKFLAPGTPARFSGSL |
| | | | EGGKAALTLSGVQPEDEAEYYCVLYYSNRWVFGSGTKLTVL |
| 2171 | E11 x I2M- | artificial | QVQLVQSGAEVKKPGESVKVSCKASGYTFTNYGMNWVKQAPGQGLEWMGWINTYTGEP |
| | Full | | TYADKFQGRVTMTTDTSTSTAYMEIRNLGGDDTAVYYCARWSWSDGYYVYFDYWGQGT |
| | Sequence | | SVTVSSGGGGSGGGGSGGGGSDIVMTQSPDSLTVSLGERTTINCKSSQSVLDSSTNKN |
| | | | SLAWYQQKPGQPPKLLLSWASTRESGIPDRFSGSGSGTDFTLTIDSPQPEDSATYYCQ |
| | | | QSAHFPITFGQGTRLEIKSGGGGSEVQLVESGGGLVQPGGSLKLSCAASGFTFNKYAM |
| | | | NWVRQAPGKGMEWVARIRSKYNNYATYYADAVKDRFTISRDDSKNTLYLQMNNLKTED |
| | | | TAVYYCVRAGNFGTSYISYWAYWGQGTLVTVSSGGGGSGGGGSGGGGSQTVVTQEPSL |
| | | | TVSPGGTVTITCGSSTGAVTSGNYPNWVQKKPGQAPRGLIGGTKFLAPGTPARFSGSL |
| | | | SGGKAALTLSGVQPEDEAEYYCVLWYSNRWVFGSGTKLTVL |
| 2172 | E11 x I2M2 | artificial | QVQLVQSGAEVKKPGESVKVSCKASGYTFTNYGMNWVKQAPGQGLEWMGWINTYTGEP |
| | -Full | | TYADKFQGRVTMTTDTSTSTAYMEIRNLGGDDTAVYYCARWSWSDGYYVYFDYWGQGT |
| | Sequence | | SVTVSSGGGGSGGGGSGGGGSDIVMTQSPDSLTVSLGERTTINCKSSQSVLDSSTNKN |
| | | | SLAWYQQKPGQPPKLLLSWASTRESGIPDRFSGSGSGTDFTLTIDSPQPEDSATYYCQ |
| | | | QSAHFPITFGQGTRLEIKSGGGGSEVQLVESGGGLVQPGGSLKLSCAASGFTENKYAI |
| | | | NWVREAPGKGLEWVARIRSKYNNYATYYADAVKDRFTISRDDSKNTAYLQMNNLKTED |
| | | | TAVYYCVRNANFGTSYISYFAYWGQGTLVTVSSGGGGSGGGGSGGGGSQTVVTQEPSL |
| | | | TVSPGGTVTLTCGSSTGAVTSGNYPNWVQKKPGQAPRGLIGGTKFLAPGTPARFSGSL |
| | | | LGGKAALTLSGVQPEDEAEYYCVLWYSNRWVFGSGTKLTVL |
| 2173 | CD33 E11 CC | artificial | QVQLVQSGAEVKKPGESVKVSCKASGYTFTNYGMNWVKQAPGQCLEWMGWINTYTGEP |
| | x I2C x | | TYADKFQGRVTMTTDTSTSTAYMEIRNLGGDDTAVYYCARWSWSDGYYVYFDYWGQGT |
| | scFc-Full | | SVTVSSGGGGSGGGGSGGGGSDIVMTQSPDSLTVSLGERTTINCKSSQSVLDSSTNKN |
| | Sequence | | SLAWYQQKPGQPPKLLLSWASTRESGIPDRFSGSGSGTDFTLTIDSPQPEDSATYYCQ |
| | | | QSAHFPITFGCGTRLEIKSGGGGSEVQLVESGGGLVQPGGSLKLSCAASGFTENKYAM |
| | | | NWVRQAPGKGLEWVARIRSKYNNYATYYADSVKDRFTISRDDSKNTAYLQMNNLKTED |
| | | | TAVYYCVRHGNFGNSYISYWAYWGQGTLVTVSSGGGGSGGGGSGGGGSQTVVTQEPSL |
| | | | TVSPGGTVTLTCGSSTGAVTSGNYPNWVQQKPGQAPRGLIGGTKFLAPGTPARFSGSL |
| | | | LGGKAALTLSGVQPEDEAEYYCVLWYSNRWVFGGGTKLTVLGGGGDKTHTCPPCPAPE |
| | | | LLGGPSVFLFPPKPKDTLMISRTPEVTCVVVDVSHEDPEVKFNWYVDGVEVHNAKTKP |
| | | | CEEQYGSTYRCVSVLTVLHQDWLNGKEYKCKVSNKALPAPIEKTISKAKGQPREPQVY |
| | | | TLPPSREEMTKNQVSLTCLVKGFYPSDIAVEWESNGQPENNYKTTPPVLDSDGSFFLY |
| | | | SKLTVDKSRWQQGNVFSCSVMHEALHNHYTQKSLSLSPGKGGGGSGGGGSGGGGSGGG |
| | | | GSGGGGSGGGGSDKTHTCPPCPAPELLGGPSVFLFPPKPKDTLMISRTPEVTCVVVDV |
| | | | SHEDPEVKFNWYVDGVEVHNAKTKPCEEQYGSTYRCVSVLTVLHQDWLNGKEYKCKVS |
| | | | NKALPAPIEKTISKAKGQPREPQVYTLPPSREEMTKNQVSLTCLVKGFYPSDIAVEWE |
| | | | SNGQPENNYKTTPPVLDSDGSFFLYSKLTVDKSRWQQGNVFSCSVMHEALHNHYTQKS |
| | | | LSLSPGK |
| 2174 | CD33 E11 CC | artificial | QVQLVQSGAEVKKPGESVKVSCKASGYTFTNYGMNWVKQAPGQCLEWMGWINTYTGEP |
| | x I2E X | | TYADKFQGRVTMTTDTSTSTAYMEIRNLGGDDTAVYYCARWSWSDGYYVYFDYWGQGT |
| | ScFc-Full | | SVTVSSGGGGSGGGGSGGGGSDIVMTQSPDSLTVSLGERTTINCKSSQSVLDSSTNKN |
| | Sequence | | SLAWYQQKPGQPPKLLLSWASTRESGIPDRFSGSGSGTDFTLTIDSPQPEDSATYYCQ |
| | | | QSAHFPITFGCGTRLEIKSGGGGSEVQLVESGGGLVQPGGSLKLSCAASGFTENKYAI |
| | | | NWVRQAPGKGLEWVARIRSKYNNYATYYADAVKDRFTISRDDSKNTVYLQMNNLKTED |
| | | | TAVYYCARAGNFGSSYISYWAYWGQGTLVTVSSGGGGSGGGGSGGGGSQTVVTQEPSL |
| | | | TVSPGGTVTITCGSSTGAVTSGNYPNWVQKKPGQAPRGLIGGTKFLAPGTPARFSGSL |
| | | | SGGKAALTLSGVQPEDEAEYYCVLWYSNRWVFGSGTKLTVLGGGGDKTHTCPPCPAPE |
| | | | LLGGPSVFLFPPKPKDTLMISRTPEVTCVVVDVSHEDPEVKFNWYVDGVEVHNAKTKP |
| | | | CEEQYGSTYRCVSVLTVLHQDWLNGKEYKCKVSNKALPAPIEKTISKAKGQPREPQVY |
| | | | TLPPSREEMTKNQVSLTCLVKGFYPSDIAVEWESNGQPENNYKTTPPVLDSDGSFFLY |
| | | | SKLTVDKSRWQQGNVFSCSVMHEALHNHYTQKSLSLSPGKGGGGSGGGGSGGGGSGGG |
| | | | GSGGGGSGGGGSDKTHTCPPCPAPELLGGPSVFLFPPKPKDTLMISRTPEVTCVVVDV |
| | | | SHEDPEVKFNWYVDGVEVHNAKTKPCEEQYGSTYRCVSVLTVLHQDWLNGKEYKCKVS |
| | | | NKALPAPIEKTISKAKGQPREPQVYTLPPSREEMTKNQVSLTCLVKGFYPSDIAVEWE |
| | | | SNGQPENNYKTTPPVLDSDGSFFLYSKLTVDKSRWQQGNVFSCSVMHEALHNHYTQKS |
| | | | LSLSPGK |
| 2175 | CD33 E11 CC | artificial | QVQLVQSGAEVKKPGESVKVSCKASGYTFTNYGMNWVKQAPGQCLEWMGWINTYTGEP |
| | x I2K x | | TYADKFQGRVTMTTDTSTSTAYMEIRNLGGDDTAVYYCARWSWSDGYYVYFDYWGQGT |
| | scFc-Full | | SVTVSSGGGGSGGGGSGGGGSDIVMTQSPDSLTVSLGERTTINCKSSQSVLDSSTNKN |
| | Sequence | | SLAWYQQKPGQPPKLLLSWASTRESGIPDRFSGSGSGTDFTLTIDSPQPEDSATYYCQ |
| | | | QSAHFPITFGCGTRLEIKSGGGGSEVQLVESGGGLVQPGGSLKLSCAASGFTFNKYAM |
| | | | NWVRQAPGKGLEWVARIRSKYNNYATYYAEAVKGRFTISRDDSKNTVYLQMNNLKTED |
| | | | TAVYYCVRNENIGTSYISYWAYWGQGTLVTVSSGGGGSGGGGSGGGGSQTVVTQEPSL |
| | | | TVSPGGTVTITCGSSTGAVTSGNYPNWVQQKPGQAPRGLIGGTKFLAPGTPARFSGSL |
| | | | SGGKAALTLSGVQPEDEAEYYCVLWYSNRWVFGSGTKLTVLGGGGDKTHTCPPCPAPE |
| | | | LLGGPSVFLFPPKPKDTLMISRTPEVTCVVVDVSHEDPEVKENWYVDGVEVHNAKTKP |
| | | | CEEQYGSTYRCVSVLTVLHQDWLNGKEYKCKVSNKALPAPIEKTISKAKGQPREPQVY |
| | | | TLPPSREEMTKNQVSLTCLVKGFYPSDIAVEWESNGQPENNYKTTPPVLDSDGSFFLY |
| | | | SKLTVDKSRWQQGNVFSCSVMHEALHNHYTQKSLSLSPGKGGGGSGGGGSGGGGSGGG |
| | | | GSGGGGSGGGGSDKTHTCPPCPAPELLGGPSVFLFPPKPKDTLMISRTPEVTCVVVDV |
| | | | SHEDPEVKFNWYVDGVEVHNAKTKPCEEQYGSTYRCVSVLTVLHQDWLNGKEYKCKVS |
| | | | NKALPAPIEKTISKAKGQPREPQVYTLPPSREEMTKNQVSLTCLVKGFYPSDIAVEWE |
| | | | SNGQPENNYKTTPPVLDSDGSFFLYSKLTVDKSRWQQGNVFSCSVMHEALHNHYTQKS |
| | | | LSLSPGK |
| 2176 | CD33 E11 CC | artificial | QVQLVQSGAEVKKPGESVKVSCKASGYTFTNYGMNWVKQAPGQCLEWMGWINTYTGEP |
| | x I2L x | | TYADKFQGRVTMTTDTSTSTAYMEIRNLGGDDTAVYYCARWSWSDGYYVYFDYWGQGT |
| | scFc-Full | | SVTVSSGGGGSGGGGSGGGGSDIVMTQSPDSLTVSLGERTTINCKSSQSVLDSSTNKN |
| | Sequence | | SLAWYQQKPGQPPKLLLSWASTRESGIPDRFSGSGSGTDFTLTIDSPQPEDSATYYCQ |
| | | | QSAHFPITFGCGTRLEIKSGGGGSEVQLVESGGGLVQPGGSLKLSCAASGFTENKYAM |
| | | | NWVRQAPGKGMEWVARIRSKYNNYATYYADAVKDRFTISRDDSKNTLYLQMNNLKTED |
| | | | TAVYYCVRAGNFGSSYISYFAYWGQGTLVTVSSGGGGSGGGGSGGGGSQTVVTQEPSL |
| | | | TVSPGGTVTITCGSSTGAVTSGNYPNWIQKKPGQAPRGLIGGTKFLAPGTPARFSGSL |
| | | | EGGKAALTLSGVQPEDEAEYYCVLYYSNRWVFGSGTKLTVLGGGGDKTHTCPPCPAPE |
| | | | LLGGPSVFLFPPKPKDTLMISRTPEVTCVVVDVSHEDPEVKENWYVDGVEVHNAKTKP |
| | | | CEEQYGSTYRCVSVLTVLHQDWLNGKEYKCKVSNKALPAPIEKTISKAKGQPREPQVY |
| | | | TLPPSREEMTKNQVSLTCLVKGFYPSDIAVEWESNGQPENNYKTTPPVLDSDGSFFLY |
| | | | SKLTVDKSRWQQGNVFSCSVMHEALHNHYTQKSLSLSPGKGGGGSGGGGSGGGGSGGG |
| | | | GSGGGGSGGGGSDKTHTCPPCPAPELLGGPSVFLFPPKPKDTLMISRTPEVTCVVVDV |
| | | | SHEDPEVKFNWYVDGVEVHNAKTKPCEEQYGSTYRCVSVLTVLHQDWLNGKEYKCKVS |
| | | | NKALPAPIEKTISKAKGQPREPQVYTLPPSREEMTKNQVSLTCLVKGFYPSDIAVEWE |
| | | | SNGQPENNYKTTPPVLDSDGSFFLYSKLTVDKSRWQQGNVFSCSVMHEALHNHYTQKS |
| | | | LSLSPGK |
| 2177 | CD33 E11 CC | artificial | QVQLVQSGAEVKKPGESVKVSCKASGYTFTNYGMNWVKQAPGQCLEWMGWINTYTGEP |
| | x I2M X | | TYADKFQGRVTMTTDTSTSTAYMEIRNLGGDDTAVYYCARWSWSDGYYVYFDYWGQGT |
| | scFc-Full | | SVTVSSGGGGSGGGGSGGGGSDIVMTQSPDSLTVSLGERTTINCKSSQSVLDSSTNKN |
| | Sequence | | SLAWYQQKPGQPPKLLLSWASTRESGIPDRFSGSGSGTDFTLTIDSPQPEDSATYYCQ |
| | | | QSAHFPITFGCGTRLEIKSGGGGSEVQLVESGGGLVQPGGSLKLSCAASGFTENKYAM |
| | | | NWVRQAPGKGMEWVARIRSKYNNYATYYADAVKDRFTISRDDSKNTLYLQMNNLKTED |
| | | | TAVYYCVRAGNFGTSYISYWAYWGQGTLVTVSSGGGGSGGGGSGGGGSQTVVTQEPSL |
| | | | TVSPGGTVTITCGSSTGAVTSGNYPNWVQKKPGQAPRGLIGGTKFLAPGTPARFSGSL |
| | | | SGGKAALTLSGVQPEDEAEYYCVLWYSNRWVFGSGTKLTVLGGGGDKTHTCPPCPAPE |
| | | | LLGGPSVFLFPPKPKDTLMISRTPEVTCVVVDVSHEDPEVKENWYVDGVEVHNAKTKP |
| | | | CEEQYGSTYRCVSVLTVLHQDWLNGKEYKCKVSNKALPAPIEKTISKAKGQPREPQVY |
| | | | TLPPSREEMTKNQVSLTCLVKGFYPSDIAVEWESNGQPENNYKTTPPVLDSDGSFFLY |
| | | | SKLTVDKSRWQQGNVFSCSVMHEALHNHYTQKSLSLSPGKGGGGSGGGGSGGGGSGGG |
| | | | GSGGGGSGGGGSDKTHTCPPCPAPELLGGPSVFLFPPKPKDTLMISRTPEVTCVVVDV |
| | | | SHEDPEVKFNWYVDGVEVHNAKTKPCEEQYGSTYRCVSVLTVLHQDWLNGKEYKCKVS |
| | | | NKALPAPIEKTISKAKGQPREPQVYTLPPSREEMTKNQVSLTCLVKGFYPSDIAVEWE |
| | | | SNGQPENNYKTTPPVLDSDGSFFLYSKLTVDKSRWQQGNVFSCSVMHEALHNHYTQKS |
| | | | LSLSPGK |
| 2178 | CD33 E11 CC | artificial | QVQLVQSGAEVKKPGESVKVSCKASGYTFTNYGMNWVKQAPGQCLEWMGWINTYTGEP |
| | X I2M2 X | | TYADKFQGRVTMTTDTSTSTAYMEIRNLGGDDTAVYYCARWSWSDGYYVYFDYWGQGT |
| | scFc-Full | | SVTVSSGGGGSGGGGSGGGGSDIVMTQSPDSLTVSLGERTTINCKSSQSVLDSSTNKN |
| | Sequence | | SLAWYQQKPGQPPKLLLSWASTRESGIPDRFSGSGSGTDFTLTIDSPQPEDSATYYCQ |
| | | | QSAHFPITFGCGTRLEIKSGGGGSEVQLVESGGGLVQPGGSLKLSCAASGFTFNKYAI |
| | | | NWVREAPGKGLEWVARIRSKYNNYATYYADAVKDRFTISRDDSKNTAYLQMNNLKTED |
| | | | TAVYYCVRNANFGTSYISYFAYWGQGTLVTVSSGGGGSGGGGSGGGGSQTVVTQEPSL |
| | | | TVSPGGTVTLTCGSSTGAVTSGNYPNWVQKKPGQAPRGLIGGTKFLAPGTPARFSGSL |
| | | | LGGKAALTLSGVQPEDEAEYYCVLWYSNRWVFGSGTKLTVLGGGGDKTHTCPPCPAPE |
| | | | LLGGPSVFLFPPKPKDTLMISRTPEVTCVVVDVSHEDPEVKENWYVDGVEVHNAKTKP |
| | | | CEEQYGSTYRCVSVLTVLHQDWLNGKEYKCKVSNKALPAPIEKTISKAKGQPREPQVY |
| | | | TLPPSREEMTKNQVSLTCLVKGFYPSDIAVEWESNGQPENNYKTTPPVLDSDGSFFLY |
| | | | SKLTVDKSRWQQGNVFSCSVMHEALHNHYTQKSLSLSPGKGGGGSGGGGSGGGGSGGG |
| | | | GSGGGGSGGGGSDKTHTCPPCPAPELLGGPSVFLFPPKPKDTLMISRTPEVTCVVVDV |
| | | | SHEDPEVKFNWYVDGVEVHNAKTKPCEEQYGSTYRCVSVLTVLHQDWLNGKEYKCKVS |
| | | | NKALPAPIEKTISKAKGQPREPQVYTLPPSREEMTKNQVSLTCLVKGFYPSDIAVEWE |
| | | | SNGQPENNYKTTPPVLDSDGSFFLYSKLTVDKSRWQQGNVFSCSVMHEALHNHYTQKS |
| | | | LSLSPGK |
| 2179 | CD70 1 C7D | artificial | TYAMS |
| | CC-HCDR1 | | |
| 2180 | CD70 1 C7D | artificial | AISGSGGRTFYAESVEG |
| | CC-HCDR2 | | |
| 2181 | CD70 1 C7D | artificial | HDYSNYPYFDY |
| | CC-HCDR3 | | |
| 2182 | CD70 1 C7D | artificial | RASQSVRSTYLA |
| | CC-LCDR1 | | |
| 2183 | CD70 1 C7D | artificial | GASSRAT |
| | CC-LCDR2 | | |
| 2184 | CD70 1 C7D | artificial | QQYGDLPFT |
| | CC-LCDR3 | | |
| 2185 | CD70 1 C7D | artificial | EVQLLESGGGMVQPGGSLRLSCAASGFTFSTYAMSWVRQAPGKCLEWVSAISGSGGRT |
| | CC-VH | | FYAESVEGRFTISRDNSKNTLYLQMNSLRAEDTAVYYCAKHDYSNYPYFDYWGQGTLV |
| | | | TVSS |
| 2186 | CD70 1 C7D | artificial | EIVLTQSPGTLSLSPGERATLSCRASQSVRSTYLAWYQQKPGQAPRLLIYGASSRATG |
| | CC-VL | | IPDRESGSGSGTDFTLTISRLEPEDFAVYSCQQYGDLPFTFGCGTKLEIK |
| 2187 | CD70 1 C7D | artificial | EVQLLESGGGMVQPGGSLRLSCAASGFTFSTYAMSWVRQAPGKCLEWVSAISGSGGRT |
| | CC x I2C x | | FYAESVEGRETISRDNSKNTLYLQMNSLRAEDTAVYYCAKHDYSNYPYFDYWGQGTLV |
| | ScFc-Full | | TVSSGGGGSGGGGSGGGGSEIVLTQSPGTLSLSPGERATLSCRASQSVRSTYLAWYQQ |
| | Sequence | | KPGQAPRLLIYGASSRATGIPDRFSGSGSGTDFTLTISRLEPEDFAVYSCQQYGDLPF |
| | | | TFGCGTKLEIKSGGGGSEVQLVESGGGLVQPGGSLKLSCAASGFTFNKYAMNWVRQAP |
| | | | GKGLEWVARIRSKYNNYATYYADSVKDRFTISRDDSKNTAYLQMNNLKTEDTAVYYCV |
| | | | RHGNFGNSYISYWAYWGQGTLVTVSSGGGGSGGGGSGGGGSQTVVTQEPSLTVSPGGT |
| | | | VTLTCGSSTGAVTSGNYPNWVQQKPGQAPRGLIGGTKFLAPGTPARFSGSLLGGKAAL |
| | | | TLSGVQPEDEAEYYCVLWYSNRWVFGGGTKLTVLGGGGDKTHTCPPCPAPELLGGPSV |
| | | | FLFPPKPKDTLMISRTPEVTCVVVDVSHEDPEVKENWYVDGVEVHNAKTKPCEEQYGS |
| | | | TYRCVSVLTVLHQDWLNGKEYKCKVSNKALPAPIEKTISKAKGQPREPQVYTLPPSRE |
| | | | EMTKNQVSLTCLVKGFYPSDIAVEWESNGQPENNYKTTPPVLDSDGSFFLYSKLTVDK |
| | | | SRWQQGNVFSCSVMHEALHNHYTQKSLSLSPGKGGGGSGGGGSGGGGSGGGGSGGGGS |
| | | | GGGGSDKTHTCPPCPAPELLGGPSVFLFPPKPKDTLMISRTPEVTCVVVDVSHEDPEV |
| | | | KFNWYVDGVEVHNAKTKPCEEQYGSTYRCVSVLTVLHQDWLNGKEYKCKVSNKALPAP |
| | | | IEKTISKAKGQPREPQVYTLPPSREEMTKNQVSLTCLVKGFYPSDIAVEWESNGQPEN |
| | | | NYKTTPPVLDSDGSFFLYSKLTVDKSRWQQGNVFSCSVMHEALHNHYTQKSLSLSPGK |
| 2188 | CD70 1 C7D | artificial | EVQLLESGGGMVQPGGSLRLSCAASGFTFSTYAMSWVRQAPGKCLEWVSAISGSGGRT |
| | CC x I2E X | | FYAESVEGRFTISRDNSKNTLYLQMNSLRAEDTAVYYCAKHDYSNYPYFDYWGQGTLV |
| | scFc-Full | | TVSSGGGGSGGGGSGGGGSEIVLTQSPGTLSLSPGERATLSCRASQSVRSTYLAWYQQ |
| | Sequence | | KPGQAPRLLIYGASSRATGIPDRFSGSGSGTDFTLTISRLEPEDFAVYSCQQYGDLPF |
| | | | TFGCGTKLEIKSGGGGSEVQLVESGGGLVQPGGSLKLSCAASGFTENKYAINWVRQAP |
| | | | GKGLEWVARIRSKYNNYATYYADAVKDRFTISRDDSKNTVYLQMNNLKTEDTAVYYCA |
| | | | RAGNFGSSYISYWAYWGQGTLVTVSSGGGGSGGGGSGGGGSQTVVTQEPSLTVSPGGT |
| | | | VTITCGSSTGAVTSGNYPNWVQKKPGQAPRGLIGGTKFLAPGTPARFSGSLSGGKAAL |
| | | | TLSGVQPEDEAEYYCVLWYSNRWVFGSGTKLTVLGGGGDKTHTCPPCPAPELLGGPSV |
| | | | FLFPPKPKDTLMISRTPEVTCVVVDVSHEDPEVKFNWYVDGVEVHNAKTKPCEEQYGS |
| | | | TYRCVSVLTVLHQDWLNGKEYKCKVSNKALPAPIEKTISKAKGQPREPQVYTLPPSRE |
| | | | EMTKNQVSLTCLVKGFYPSDIAVEWESNGQPENNYKTTPPVLDSDGSFFLYSKLTVDK |
| | | | SRWQQGNVFSCSVMHEALHNHYTQKSLSLSPGKGGGGSGGGGSGGGGSGGGGSGGGGS |
| | | | GGGGSDKTHTCPPCPAPELLGGPSVFLFPPKPKDTLMISRTPEVTCVVVDVSHEDPEV |
| | | | KFNWYVDGVEVHNAKTKPCEEQYGSTYRCVSVLTVLHQDWLNGKEYKCKVSNKALPAP |
| | | | IEKTISKAKGQPREPQVYTLPPSREEMTKNQVSLTCLVKGFYPSDIAVEWESNGQPEN |
| | | | NYKTTPPVLDSDGSFFLYSKLTVDKSRWQQGNVFSCSVMHEALHNHYTQKSLSLSPGK |
| 2189 | CD70 1 C7D | artificial | EVQLLESGGGMVQPGGSLRLSCAASGFTFSTYAMSWVRQAPGKCLEWVSAISGSGGRT |
| | CC x I2K X | | FYAESVEGRFTISRDNSKNTLYLQMNSLRAEDTAVYYCAKHDYSNYPYFDYWGQGTLV |
| | scFc-Full | | TVSSGGGGSGGGGSGGGGSEIVLTQSPGTLSLSPGERATLSCRASQSVRSTYLAWYQQ |
| | Sequence | | KPGQAPRLLIYGASSRATGIPDRESGSGSGTDFTLTISRLEPEDFAVYSCQQYGDLPF |
| | | | TFGCGTKLEIKSGGGGSEVQLVESGGGLVQPGGSLKLSCAASGFTFNKYAMNWVRQAP |
| | | | GKGLEWVARIRSKYNNYATYYAEAVKGRFTISRDDSKNTVYLQMNNLKTEDTAVYYCV |
| | | | RNENIGTSYISYWAYWGQGTLVTVSSGGGGSGGGGSGGGGSQTVVTQEPSLTVSPGGT |
| | | | VTITCGSSTGAVTSGNYPNWVQQKPGQAPRGLIGGTKFLAPGTPARFSGSLSGGKAAL |
| | | | TLSGVQPEDEAEYYCVLWYSNRWVFGSGTKLTVLGGGGDKTHTCPPCPAPELLGGPSV |
| | | | FLFPPKPKDTLMISRTPEVTCVVVDVSHEDPEVKENWYVDGVEVHNAKTKPCEEQYGS |
| | | | TYRCVSVLTVLHQDWLNGKEYKCKVSNKALPAPIEKTISKAKGQPREPQVYTLPPSRE |
| | | | EMTKNQVSLTCLVKGFYPSDIAVEWESNGQPENNYKTTPPVLDSDGSFFLYSKLTVDK |
| | | | SRWQQGNVFSCSVMHEALHNHYTQKSLSLSPGKGGGGSGGGGSGGGGSGGGGSGGGGS |
| | | | GGGGSDKTHTCPPCPAPELLGGPSVFLFPPKPKDTLMISRTPEVTCVVVDVSHEDPEV |
| | | | KFNWYVDGVEVHNAKTKPCEEQYGSTYRCVSVLTVLHQDWLNGKEYKCKVSNKALPAP |
| | | | IEKTISKAKGQPREPQVYTLPPSREEMTKNQVSLTCLVKGFYPSDIAVEWESNGQPEN |
| | | | NYKTTPPVLDSDGSFFLYSKLTVDKSRWQQGNVFSCSVMHEALHNHYTQKSLSLSPGK |
| 2190 | CD70 1 C7D | artificial | EVQLLESGGGMVQPGGSLRLSCAASGFTFSTYAMSWVRQAPGKCLEWVSAISGSGGRT |
| | CC x I2L x | | FYAESVEGRETISRDNSKNTLYLQMNSLRAEDTAVYYCAKHDYSNYPYFDYWGQGTLV |
| | scFc-Full | | TVSSGGGGSGGGGSGGGGSEIVLTQSPGTLSLSPGERATLSCRASQSVRSTYLAWYQQ |
| | Sequence | | KPGQAPRLLIYGASSRATGIPDRFSGSGSGTDFTLTISRLEPEDFAVYSCQQYGDLPF |
| | | | TFGCGTKLEIKSGGGGSEVQLVESGGGLVQPGGSLKLSCAASGFTFNKYAMNWVRQAP |
| | | | GKGMEWVARIRSKYNNYATYYADAVKDRFTISRDDSKNTLYLQMNNLKTEDTAVYYCV |
| | | | RAGNFGSSYISYFAYWGQGTLVTVSSGGGGSGGGGSGGGGSQTVVTQEPSLTVSPGGT |
| | | | VTITCGSSTGAVTSGNYPNWIQKKPGQAPRGLIGGTKFLAPGTPARFSGSLEGGKAAL |
| | | | TLSGVQPEDEAEYYCVLYYSNRWVFGSGTKLTVLGGGGDKTHTCPPCPAPELLGGPSV |
| | | | FLFPPKPKDTLMISRTPEVTCVVVDVSHEDPEVKENWYVDGVEVHNAKTKPCEEQYGS |
| | | | TYRCVSVLTVLHQDWLNGKEYKCKVSNKALPAPIEKTISKAKGQPREPQVYTLPPSRE |
| | | | EMTKNQVSLTCLVKGFYPSDIAVEWESNGQPENNYKTTPPVLDSDGSFFLYSKLTVDK |
| | | | SRWQQGNVFSCSVMHEALHNHYTQKSLSLSPGKGGGGSGGGGSGGGGSGGGGSGGGGS |
| | | | GGGGSDKTHTCPPCPAPELLGGPSVFLFPPKPKDTLMISRTPEVTCVVVDVSHEDPEV |
| | | | KFNWYVDGVEVHNAKTKPCEEQYGSTYRCVSVLTVLHQDWLNGKEYKCKVSNKALPAP |
| | | | IEKTISKAKGQPREPQVYTLPPSREEMTKNQVSLTCLVKGFYPSDIAVEWESNGQPEN |
| | | | NYKTTPPVLDSDGSFFLYSKLTVDKSRWQQGNVFSCSVMHEALHNHYTQKSLSLSPGK |
| 2191 | CD70 1 C7D | artificial | EVQLLESGGGMVQPGGSLRLSCAASGFTFSTYAMSWVRQAPGKCLEWVSAISGSGGRT |
| | CC x I2M x | | FYAESVEGRETISRDNSKNTLYLQMNSLRAEDTAVYYCAKHDYSNYPYFDYWGQGTLV |
| | scFc-Full | | TVSSGGGGSGGGGSGGGGSEIVLTQSPGTLSLSPGERATLSCRASQSVRSTYLAWYQQ |
| | Sequence | | KPGQAPRLLIYGASSRATGIPDRFSGSGSGTDFTLTISRLEPEDFAVYSCQQYGDLPF |
| | | | TFGCGTKLEIKSGGGGSEVQLVESGGGLVQPGGSLKLSCAASGFTFNKYAMNWVRQAP |
| | | | GKGMEWVARIRSKYNNYATYYADAVKDRFTISRDDSKNTLYLQMNNLKTEDTAVYYCV |
| | | | RAGNFGTSYISYWAYWGQGTLVTVSSGGGGSGGGGSGGGGSQTVVTQEPSLTVSPGGT |
| | | | VTITCGSSTGAVTSGNYPNWVQKKPGQAPRGLIGGTKFLAPGTPARFSGSLSGGKAAL |
| | | | TLSGVQPEDEAEYYCVLWYSNRWVFGSGTKLTVLGGGGDKTHTCPPCPAPELLGGPSV |
| | | | FLFPPKPKDTLMISRTPEVTCVVVDVSHEDPEVKENWYVDGVEVHNAKTKPCEEQYGS |
| | | | TYRCVSVLTVLHQDWLNGKEYKCKVSNKALPAPIEKTISKAKGQPREPQVYTLPPSRE |
| | | | EMTKNQVSLTCLVKGFYPSDIAVEWESNGQPENNYKTTPPVLDSDGSFFLYSKLTVDK |
| | | | SRWQQGNVFSCSVMHEALHNHYTQKSLSLSPGKGGGGSGGGGSGGGGSGGGGSGGGGS |
| | | | GGGGSDKTHTCPPCPAPELLGGPSVFLFPPKPKDTLMISRTPEVTCVVVDVSHEDPEV |
| | | | KFNWYVDGVEVHNAKTKPCEEQYGSTYRCVSVLTVLHQDWLNGKEYKCKVSNKALPAP |
| | | | IEKTISKAKGQPREPQVYTLPPSREEMTKNQVSLTCLVKGFYPSDIAVEWESNGQPEN |
| | | | NYKTTPPVLDSDGSFFLYSKLTVDKSRWQQGNVFSCSVMHEALHNHYTQKSLSLSPGK |
| 2192 | CD70 1 C7D | artificial | EVQLLESGGGMVQPGGSLRLSCAASGFTFSTYAMSWVRQAPGKCLEWVSAISGSGGRT |
| | CC x I2M2 X | | FYAESVEGRFTISRDNSKNTLYLQMNSLRAEDTAVYYCAKHDYSNYPYFDYWGQGTLV |
| | scFc-Full | | TVSSGGGGSGGGGSGGGGSEIVLTQSPGTLSLSPGERATLSCRASQSVRSTYLAWYQQ |
| | Sequence | | KPGQAPRLLIYGASSRATGIPDRFSGSGSGTDFTLTISRLEPEDFAVYSCQQYGDLPF |
| | | | TFGCGTKLEIKSGGGGSEVQLVESGGGLVQPGGSLKLSCAASGFTENKYAINWVREAP |
| | | | GKGLEWVARIRSKYNNYATYYADAVKDRFTISRDDSKNTAYLQMNNLKTEDTAVYYCV |
| | | | RNANFGTSYISYFAYWGQGTLVTVSSGGGGSGGGGSGGGGSQTVVTQEPSLTVSPGGT |
| | | | VTLTCGSSTGAVTSGNYPNWVQKKPGQAPRGLIGGTKFLAPGTPARFSGSLLGGKAAL |
| | | | TLSGVQPEDEAEYYCVLWYSNRWVFGSGTKLTVLGGGGDKTHTCPPCPAPELLGGPSV |
| | | | FLFPPKPKDTLMISRTPEVTCVVVDVSHEDPEVKFNWYVDGVEVHNAKTKPCEEQYGS |
| | | | TYRCVSVLTVLHQDWLNGKEYKCKVSNKALPAPIEKTISKAKGQPREPQVYTLPPSRE |
| | | | EMTKNQVSLTCLVKGFYPSDIAVEWESNGQPENNYKTTPPVLDSDGSFFLYSKLTVDK |
| | | | SRWQQGNVFSCSVMHEALHNHYTQKSLSLSPGKGGGGSGGGGSGGGGSGGGGSGGGGS |
| | | | GGGGSDKTHTCPPCPAPELLGGPSVFLFPPKPKDTLMISRTPEVTCVVVDVSHEDPEV |
| | | | KFNWYVDGVEVHNAKTKPCEEQYGSTYRCVSVLTVLHQDWLNGKEYKCKVSNKALPAP |
| | | | IEKTISKAKGQPREPQVYTLPPSREEMTKNQVSLTCLVKGFYPSDIAVEWESNGQPEN |
| | | | NYKTTPPVLDSDGSFFLYSKLTVDKSRWQQGNVFSCSVMHEALHNHYTQKSLSLSPGK |
| 2193 | CH19 | artificial | SYGMH |
| | 2G6.007 CC | | |
| | -HCDR1 | | |
| 2194 | CH19 | artificial | FIWYEGSNKYYAESVKD |
| | 2G6.007 CC | | |
| | -HCDR2 | | |
| 2195 | CH19 | artificial | RAGIIGTIGYYYGMDV |
| | 2G6.007 CC | | |
| | -HCDR3 | | |
| 2196 | CH19 | artificial | SGDRLGEKYTS |
| | 2G6.007 CC | | |
| | -LCDR1 | | |
| 2197 | CH19 | artificial | QDTKRPS |
| | 2G6.007 CC | | |
| | -LCDR2 | | |
| 2198 | CH19 | artificial | QAWESSTVV |
| | 2G6.007 CC | | |
| | -LCDR3 | | |
| 2199 | CH19 | artificial | QVQLVESGGGVVQPGGSLRLSCAASGFTFSSYGMHWVRQAPGKCLEWVAFIWYEGSNK |
| | 2G6.007 CC | | YYAESVKDRFTISRDNSKNTLYLQMNSLRAEDTAVYYCARRAGIIGTIGYYYGMDVWG |
| | -VH | | QGTTVTVSS |
| 2200 | CH19 | artificial | SYELTQPPSVSVSPGQTASITCSGDRLGEKYTSWYQQRPGQSPLLVIYQDTKRPSGIP |
| | 2G6.007 CC | | ERFSGSNSGNTATLTISGTQAMDEADYYCQAWESSTVVFGCGTKLTVL |
| | -VL | | |
| 2201 | CH19 | artificial | QVQLVESGGGVVQPGGSLRLSCAASGFTFSSYGMHWVRQAPGKCLEWVAFIWYEGSNK |
| | 2G6.007 CCx | | YYAESVKDRFTISRDNSKNTLYLQMNSLRAEDTAVYYCARRAGIIGTIGYYYGMDVWG |
| | I2C x scFc | | QGTTVTVSSGGGGSGGGGSGGGGSSYELTQPPSVSVSPGQTASITCSGDRLGEKYTSW |
| | -Full | | YQQRPGQSPLLVIYQDTKRPSGIPERFSGSNSGNTATLTISGTQAMDEADYYCQAWES |
| | Sequence | | STVVFGCGTKLTVLSGGGGSEVQLVESGGGLVQPGGSLKLSCAASGFTFNKYAMNWVR |
| | | | QAPGKGLEWVARIRSKYNNYATYYADSVKDRFTISRDDSKNTAYLQMNNLKTEDTAVY |
| | | | YCVRHGNFGNSYISYWAYWGQGTLVTVSSGGGGSGGGGSGGGGSQTVVTQEPSLTVSP |
| | | | GGTVTLTCGSSTGAVTSGNYPNWVQQKPGQAPRGLIGGTKFLAPGTPARFSGSLLGGK |
| | | | AALTLSGVQPEDEAEYYCVLWYSNRWVFGGGTKLTVLGGGGDKTHTCPPCPAPELLGG |
| | | | PSVFLFPPKPKDTLMISRTPEVTCVVVDVSHEDPEVKENWYVDGVEVHNAKTKPCEEQ |
| | | | YGSTYRCVSVLTVLHQDWLNGKEYKCKVSNKALPAPIEKTISKAKGQPREPQVYTLPP |
| | | | SREEMTKNQVSLTCLVKGFYPSDIAVEWESNGQPENNYKTTPPVLDSDGSFFLYSKLT |
| | | | VDKSRWQQGNVFSCSVMHEALHNHYTQKSLSLSPGKGGGGSGGGGSGGGGSGGGGSGG |
| | | | GGSGGGGSDKTHTCPPCPAPELLGGPSVFLFPPKPKDTLMISRTPEVTCVVVDVSHED |
| | | | PEVKFNWYVDGVEVHNAKTKPCEEQYGSTYRCVSVLTVLHQDWLNGKEYKCKVSNKAL |
| | | | PAPIEKTISKAKGQPREPQVYTLPPSREEMTKNQVSLTCLVKGFYPSDIAVEWESNGQ |
| | | | PENNYKTTPPVLDSDGSFFLYSKLTVDKSRWQQGNVFSCSVMHEALHNHYTQKSLSLS |
| | | | PGK |
| 2202 | CH19 | artificial | QVQLVESGGGVVQPGGSLRLSCAASGFTFSSYGMHWVRQAPGKCLEWVAFIWYEGSNK |
| | 2G6.007 CCx | | YYAESVKDRFTISRDNSKNTLYLQMNSLRAEDTAVYYCARRAGIIGTIGYYYGMDVWG |
| | I2C x scFc | | QGTTVTVSSGGGGSGGGGSGGGGSSYELTQPPSVSVSPGQTASITCSGDRLGEKYTSW |
| | delGK- | | YQQRPGQSPLLVIYQDTKRPSGIPERFSGSNSGNTATLTISGTQAMDEADYYCQAWES |
| | Full | | STVVFGCGTKLTVLSGGGGSEVQLVESGGGLVQPGGSLKLSCAASGFTFNKYAMNWVR |
| | Sequence | | QAPGKGLEWVARIRSKYNNYATYYADSVKDRFTISRDDSKNTAYLQMNNLKTEDTAVY |
| | | | YCVRHGNFGNSYISYWAYWGQGTLVTVSSGGGGSGGGGSGGGGSQTVVTQEPSLTVSP |
| | | | GGTVTLTCGSSTGAVTSGNYPNWVQQKPGQAPRGLIGGTKFLAPGTPARFSGSLLGGK |
| | | | AALTLSGVQPEDEAEYYCVLWYSNRWVFGGGTKLTVLGGGGDKTHTCPPCPAPELLGG |
| | | | PSVFLFPPKPKDTLMISRTPEVTCVVVDVSHEDPEVKENWYVDGVEVHNAKTKPCEEQ |
| | | | YGSTYRCVSVLTVLHQDWLNGKEYKCKVSNKALPAPIEKTISKAKGQPREPQVYTLPP |
| | | | SREEMTKNQVSLTCLVKGFYPSDIAVEWESNGQPENNYKTTPPVLDSDGSFFLYSKLT |
| | | | VDKSRWQQGNVFSCSVMHEALHNHYTQKSLSLSPGGGGSGGGGSGGGGSGGGGSGGGG |
| | | | SGGGGSDKTHTCPPCPAPELLGGPSVFLFPPKPKDTLMISRTPEVTCVVVDVSHEDPE |
| | | | VKFNWYVDGVEVHNAKTKPCEEQYGSTYRCVSVLTVLHQDWLNGKEYKCKVSNKALPA |
| | | | PIEKTISKAKGQPREPQVYTLPPSREEMTKNQVSLTCLVKGFYPSDIAVEWESNGQPE |
| | | | NNYKTTPPVLDSDGSFFLYSKLTVDKSRWQQGNVFSCSVMHEALHNHYTQKSLSLSPG |
| | | | K |
| 2203 | CH19 | artificial | QVQLVESGGGVVQPGGSLRLSCAASGFTFSSYGMHWVRQAPGKCLEWVAFIWYEGSNK |
| | 2G6.007 CCx | | YYAESVKDRFTISRDNSKNTLYLQMNSLRAEDTAVYYCARRAGIIGTIGYYYGMDVWG |
| | I2E x scFc | | QGTTVTVSSGGGGSGGGGSGGGGSSYELTQPPSVSVSPGQTASITCSGDRLGEKYTSW |
| | -Full | | YQQRPGQSPLLVIYQDTKRPSGIPERFSGSNSGNTATLTISGTQAMDEADYYCQAWES |
| | Sequence | | STVVFGCGTKLTVLSGGGGSEVQLVESGGGLVQPGGSLKLSCAASGFTFNKYAINWVR |
| | | | QAPGKGLEWVARIRSKYNNYATYYADAVKDRFTISRDDSKNTVYLQMNNLKTEDTAVY |
| | | | YCARAGNFGSSYISYWAYWGQGTLVTVSSGGGGSGGGGSGGGGSQTVVTQEPSLTVSP |
| | | | GGTVTITCGSSTGAVTSGNYPNWVQKKPGQAPRGLIGGTKFLAPGTPARFSGSLSGGK |
| | | | AALTLSGVQPEDEAEYYCVLWYSNRWVFGSGTKLTVLGGGGDKTHTCPPCPAPELLGG |
| | | | PSVFLFPPKPKDTLMISRTPEVTCVVVDVSHEDPEVKENWYVDGVEVHNAKTKPCEEQ |
| | | | YGSTYRCVSVLTVLHQDWLNGKEYKCKVSNKALPAPIEKTISKAKGQPREPQVYTLPP |
| | | | SREEMTKNQVSLTCLVKGFYPSDIAVEWESNGQPENNYKTTPPVLDSDGSFFLYSKLT |
| | | | VDKSRWQQGNVFSCSVMHEALHNHYTQKSLSLSPGKGGGGSGGGGSGGGGSGGGGSGG |
| | | | GGSGGGGSDKTHTCPPCPAPELLGGPSVFLFPPKPKDTLMISRTPEVTCVVVDVSHED |
| | | | PEVKFNWYVDGVEVHNAKTKPCEEQYGSTYRCVSVLTVLHQDWLNGKEYKCKVSNKAL |
| | | | PAPIEKTISKAKGQPREPQVYTLPPSREEMTKNQVSLTCLVKGFYPSDIAVEWESNGQ |
| | | | PENNYKTTPPVLDSDGSFFLYSKLTVDKSRWQQGNVFSCSVMHEALHNHYTQKSLSLS |
| | | | PGK |
| 2204 | CH19 | artificial | QVQLVESGGGVVQPGGSLRLSCAASGFTFSSYGMHWVRQAPGKCLEWVAFIWYEGSNK |
| | 2G6.007 CCx | | YYAESVKDRFTISRDNSKNTLYLQMNSLRAEDTAVYYCARRAGIIGTIGYYYGMDVWG |
| | I2E x scFc | | QGTTVTVSSGGGGSGGGGSGGGGSSYELTQPPSVSVSPGQTASITCSGDRLGEKYTSW |
| | delGK- | | YQQRPGQSPLLVIYQDTKRPSGIPERFSGSNSGNTATLTISGTQAMDEADYYCQAWES |
| | Full | | STVVFGCGTKLTVLSGGGGSEVQLVESGGGLVQPGGSLKLSCAASGFTFNKYAINWVR |
| | Sequence | | QAPGKGLEWVARIRSKYNNYATYYADAVKDRFTISRDDSKNTVYLQMNNLKTEDTAVY |
| | | | YCARAGNFGSSYISYWAYWGQGTLVTVSSGGGGSGGGGSGGGGSQTVVTQEPSLTVSP |
| | | | GGTVTITCGSSTGAVTSGNYPNWVQKKPGQAPRGLIGGTKFLAPGTPARFSGSLSGGK |
| | | | AALTLSGVQPEDEAEYYCVLWYSNRWVFGSGTKLTVLGGGGDKTHTCPPCPAPELLGG |
| | | | PSVFLFPPKPKDTLMISRTPEVTCVVVDVSHEDPEVKENWYVDGVEVHNAKTKPCEEQ |
| | | | YGSTYRCVSVLTVLHQDWLNGKEYKCKVSNKALPAPIEKTISKAKGQPREPQVYTLPP |
| | | | SREEMTKNQVSLTCLVKGFYPSDIAVEWESNGQPENNYKTTPPVLDSDGSFFLYSKLT |
| | | | VDKSRWQQGNVFSCSVMHEALHNHYTQKSLSLSPGGGGSGGGGSGGGGSGGGGSGGGG |
| | | | SGGGGSDKTHTCPPCPAPELLGGPSVFLFPPKPKDTLMISRTPEVTCVVVDVSHEDPE |
| | | | VKFNWYVDGVEVHNAKTKPCEEQYGSTYRCVSVLTVLHQDWLNGKEYKCKVSNKALPA |
| | | | PIEKTISKAKGQPREPQVYTLPPSREEMTKNQVSLTCLVKGFYPSDIAVEWESNGQPE |
| | | | NNYKTTPPVLDSDGSFFLYSKLTVDKSRWQQGNVFSCSVMHEALHNHYTQKSLSLSPG |
| | | | K |
| 2205 | CH19 | artificial | QVQLVESGGGVVQPGGSLRLSCAASGFTFSSYGMHWVRQAPGKCLEWVAFIWYEGSNK |
| | 2G6.007 CCx | | YYAESVKDRFTISRDNSKNTLYLQMNSLRAEDTAVYYCARRAGIIGTIGYYYGMDVWG |
| | I2K x scFc | | QGTTVTVSSGGGGSGGGGSGGGGSSYELTQPPSVSVSPGQTASITCSGDRLGEKYTSW |
| | -Full | | YQQRPGQSPLLVIYQDTKRPSGIPERFSGSNSGNTATLTISGTQAMDEADYYCQAWES |
| | Sequence | | STVVFGCGTKLTVLSGGGGSEVQLVESGGGLVQPGGSLKLSCAASGFTENKYAMNWVR |
| | | | QAPGKGLEWVARIRSKYNNYATYYAEAVKGRFTISRDDSKNTVYLQMNNLKTEDTAVY |
| | | | YCVRNENIGTSYISYWAYWGQGTLVTVSSGGGGSGGGGSGGGGSQTVVTQEPSLTVSP |
| | | | GGTVTITCGSSTGAVTSGNYPNWVQQKPGQAPRGLIGGTKFLAPGTPARFSGSLSGGK |
| | | | AALTLSGVQPEDEAEYYCVLWYSNRWVFGSGTKLTVLGGGGDKTHTCPPCPAPELLGG |
| | | | PSVFLFPPKPKDTLMISRTPEVTCVVVDVSHEDPEVKENWYVDGVEVHNAKTKPCEEQ |
| | | | YGSTYRCVSVLTVLHQDWLNGKEYKCKVSNKALPAPIEKTISKAKGQPREPQVYTLPP |
| | | | SREEMTKNQVSLTCLVKGFYPSDIAVEWESNGQPENNYKTTPPVLDSDGSFFLYSKLT |
| | | | VDKSRWQQGNVFSCSVMHEALHNHYTQKSLSLSPGKGGGGSGGGGSGGGGSGGGGSGG |
| | | | GGSGGGGSDKTHTCPPCPAPELLGGPSVFLFPPKPKDTLMISRTPEVTCVVVDVSHED |
| | | | PEVKFNWYVDGVEVHNAKTKPCEEQYGSTYRCVSVLTVLHQDWLNGKEYKCKVSNKAL |
| | | | PAPIEKTISKAKGQPREPQVYTLPPSREEMTKNQVSLTCLVKGFYPSDIAVEWESNGQ |
| | | | PENNYKTTPPVLDSDGSFFLYSKLTVDKSRWQQGNVFSCSVMHEALHNHYTQKSLSLS |
| | | | PGK |
| 2206 | CH19 | artificial | QVQLVESGGGVVQPGGSLRLSCAASGFTFSSYGMHWVRQAPGKCLEWVAFIWYEGSNK |
| | 2G6.007 CCx | | YYAESVKDRFTISRDNSKNTLYLQMNSLRAEDTAVYYCARRAGIIGTIGYYYGMDVWG |
| | I2K x scFc | | QGTTVTVSSGGGGSGGGGSGGGGSSYELTQPPSVSVSPGQTASITCSGDRLGEKYTSW |
| | delGK- | | YQQRPGQSPLLVIYQDTKRPSGIPERFSGSNSGNTATLTISGTQAMDEADYYCQAWES |
| | Full | | STVVFGCGTKLTVLSGGGGSEVQLVESGGGLVQPGGSLKLSCAASGFTENKYAMNWVR |
| | Sequence | | QAPGKGLEWVARIRSKYNNYATYYAEAVKGRFTISRDDSKNTVYLQMNNLKTEDTAVY |
| | | | YCVRNENIGTSYISYWAYWGQGTLVTVSSGGGGSGGGGSGGGGSQTVVTQEPSLTVSP |
| | | | GGTVTITCGSSTGAVTSGNYPNWVQQKPGQAPRGLIGGTKFLAPGTPARFSGSLSGGK |
| | | | AALTLSGVQPEDEAEYYCVLWYSNRWVFGSGTKLTVLGGGGDKTHTCPPCPAPELLGG |
| | | | PSVFLFPPKPKDTLMISRTPEVTCVVVDVSHEDPEVKENWYVDGVEVHNAKTKPCEEQ |
| | | | YGSTYRCVSVLTVLHQDWLNGKEYKCKVSNKALPAPIEKTISKAKGQPREPQVYTLPP |
| | | | SREEMTKNQVSLTCLVKGFYPSDIAVEWESNGQPENNYKTTPPVLDSDGSFFLYSKLT |
| | | | VDKSRWQQGNVFSCSVMHEALHNHYTQKSLSLSPGGGGSGGGGSGGGGSGGGGSGGGG |
| | | | SGGGGSDKTHTCPPCPAPELLGGPSVFLFPPKPKDTLMISRTPEVTCVVVDVSHEDPE |
| | | | VKFNWYVDGVEVHNAKTKPCEEQYGSTYRCVSVLTVLHQDWLNGKEYKCKVSNKALPA |
| | | | PIEKTISKAKGQPREPQVYTLPPSREEMTKNQVSLTCLVKGFYPSDIAVEWESNGQPE |
| | | | NNYKTTPPVLDSDGSFFLYSKLTVDKSRWQQGNVFSCSVMHEALHNHYTQKSLSLSPG |
| | | | K |
| 2207 | CH19 | artificial | QVQLVESGGGVVQPGGSLRLSCAASGFTFSSYGMHWVRQAPGKCLEWVAFIWYEGSNK |
| | 2G6.007 CCx | | YYAESVKDRFTISRDNSKNTLYLQMNSLRAEDTAVYYCARRAGIIGTIGYYYGMDVWG |
| | I2L x scFc | | QGTTVTVSSGGGGSGGGGSGGGGSSYELTQPPSVSVSPGQTASITCSGDRLGEKYTSW |
| | -Full | | YQQRPGQSPLLVIYQDTKRPSGIPERFSGSNSGNTATLTISGTQAMDEADYYCQAWES |
| | Sequence | | STVVFGCGTKLTVLSGGGGSEVQLVESGGGLVQPGGSLKLSCAASGFTFNKYAMNWVR |
| | | | QAPGKGMEWVARIRSKYNNYATYYADAVKDRFTISRDDSKNTLYLQMNNLKTEDTAVY |
| | | | YCVRAGNFGSSYISYFAYWGQGTLVTVSSGGGGSGGGGSGGGGSQTVVTQEPSLTVSP |
| | | | GGTVTITCGSSTGAVTSGNYPNWIQKKPGQAPRGLIGGTKFLAPGTPARFSGSLEGGK |
| | | | AALTLSGVQPEDEAEYYCVLYYSNRWVFGSGTKLTVLGGGGDKTHTCPPCPAPELLGG |
| | | | PSVFLFPPKPKDTLMISRTPEVTCVVVDVSHEDPEVKENWYVDGVEVHNAKTKPCEEQ |
| | | | YGSTYRCVSVLTVLHQDWLNGKEYKCKVSNKALPAPIEKTISKAKGQPREPQVYTLPP |
| | | | SREEMTKNQVSLTCLVKGFYPSDIAVEWESNGQPENNYKTTPPVLDSDGSFFLYSKLT |
| | | | VDKSRWQQGNVFSCSVMHEALHNHYTQKSLSLSPGKGGGGSGGGGSGGGGSGGGGSGG |
| | | | GGSGGGGSDKTHTCPPCPAPELLGGPSVFLFPPKPKDTLMISRTPEVTCVVVDVSHED |
| | | | PEVKFNWYVDGVEVHNAKTKPCEEQYGSTYRCVSVLTVLHQDWLNGKEYKCKVSNKAL |
| | | | PAPIEKTISKAKGQPREPQVYTLPPSREEMTKNQVSLTCLVKGFYPSDIAVEWESNGQ |
| | | | PENNYKTTPPVLDSDGSFFLYSKLTVDKSRWQQGNVFSCSVMHEALHNHYTQKSLSLS |
| | | | PGK |
| 2208 | CH19 | artificial | QVQLVESGGGVVQPGGSLRLSCAASGFTFSSYGMHWVRQAPGKCLEWVAFIWYEGSNK |
| | 2G6.007 CCx | | YYAESVKDRFTISRDNSKNTLYLQMNSLRAEDTAVYYCARRAGIIGTIGYYYGMDVWG |
| | I2L x scFc | | QGTTVTVSSGGGGSGGGGSGGGGSSYELTQPPSVSVSPGQTASITCSGDRLGEKYTSW |
| | delGK- | | YQQRPGQSPLLVIYQDTKRPSGIPERFSGSNSGNTATLTISGTQAMDEADYYCQAWES |
| | Full | | STVVFGCGTKLTVLSGGGGSEVQLVESGGGLVQPGGSLKLSCAASGFTENKYAMNWVR |
| | Sequence | | QAPGKGMEWVARIRSKYNNYATYYADAVKDRFTISRDDSKNTLYLQMNNLKTEDTAVY |
| | | | YCVRAGNFGSSYISYFAYWGQGTLVTVSSGGGGSGGGGSGGGGSQTVVTQEPSLTVSP |
| | | | GGTVTITCGSSTGAVTSGNYPNWIQKKPGQAPRGLIGGTKFLAPGTPARFSGSLEGGK |
| | | | AALTLSGVQPEDEAEYYCVLYYSNRWVFGSGTKLTVLGGGGDKTHTCPPCPAPELLGG |
| | | | PSVFLFPPKPKDTLMISRTPEVTCVVVDVSHEDPEVKFNWYVDGVEVHNAKTKPCEEQ |
| | | | YGSTYRCVSVLTVLHQDWLNGKEYKCKVSNKALPAPIEKTISKAKGQPREPQVYTLPP |
| | | | SREEMTKNQVSLTCLVKGFYPSDIAVEWESNGQPENNYKTTPPVLDSDGSFFLYSKLT |
| | | | VDKSRWQQGNVFSCSVMHEALHNHYTQKSLSLSPGGGGSGGGGSGGGGSGGGGSGGGG |
| | | | SGGGGSDKTHTCPPCPAPELLGGPSVFLFPPKPKDTLMISRTPEVTCVVVDVSHEDPE |
| | | | VKFNWYVDGVEVHNAKTKPCEEQYGSTYRCVSVLTVLHQDWLNGKEYKCKVSNKALPA |
| | | | PIEKTISKAKGQPREPQVYTLPPSREEMTKNQVSLTCLVKGFYPSDIAVEWESNGQPE |
| | | | NNYKTTPPVLDSDGSFFLYSKLTVDKSRWQQGNVFSCSVMHEALHNHYTQKSLSLSPG |
| | | | K |
| 2209 | CH19 | artificial | QVQLVESGGGVVQPGGSLRLSCAASGFTFSSYGMHWVRQAPGKCLEWVAFIWYEGSNK |
| | 2G6.007 CCx | | YYAESVKDRFTISRDNSKNTLYLQMNSLRAEDTAVYYCARRAGIIGTIGYYYGMDVWG |
| | I2M x scFc | | QGTTVTVSSGGGGSGGGGSGGGGSSYELTQPPSVSVSPGQTASITCSGDRLGEKYTSW |
| | -Full | | YQQRPGQSPLLVIYQDTKRPSGIPERFSGSNSGNTATLTISGTQAMDEADYYCQAWES |
| | Sequence | | STVVFGCGTKLTVLSGGGGSEVQLVESGGGLVQPGGSLKLSCAASGFTENKYAMNWVR |
| | | | QAPGKGMEWVARIRSKYNNYATYYADAVKDRFTISRDDSKNTLYLQMNNLKTEDTAVY |
| | | | YCVRAGNFGTSYISYWAYWGQGTLVTVSSGGGGSGGGGSGGGGSQTVVTQEPSLTVSP |
| | | | GGTVTITCGSSTGAVTSGNYPNWVQKKPGQAPRGLIGGTKFLAPGTPARFSGSLSGGK |
| | | | AALTLSGVQPEDEAEYYCVLWYSNRWVFGSGTKLTVLGGGGDKTHTCPPCPAPELLGG |
| | | | PSVFLFPPKPKDTLMISRTPEVTCVVVDVSHEDPEVKENWYVDGVEVHNAKTKPCEEQ |
| | | | YGSTYRCVSVLTVLHQDWLNGKEYKCKVSNKALPAPIEKTISKAKGQPREPQVYTLPP |
| | | | SREEMTKNQVSLTCLVKGFYPSDIAVEWESNGQPENNYKTTPPVLDSDGSFFLYSKLT |
| | | | VDKSRWQQGNVFSCSVMHEALHNHYTQKSLSLSPGKGGGGSGGGGSGGGGSGGGGSGG |
| | | | GGSGGGGSDKTHTCPPCPAPELLGGPSVFLFPPKPKDTLMISRTPEVTCVVVDVSHED |
| | | | PEVKFNWYVDGVEVHNAKTKPCEEQYGSTYRCVSVLTVLHQDWLNGKEYKCKVSNKAL |
| | | | PAPIEKTISKAKGQPREPQVYTLPPSREEMTKNQVSLTCLVKGFYPSDIAVEWESNGQ |
| | | | PENNYKTTPPVLDSDGSFFLYSKLTVDKSRWQQGNVFSCSVMHEALHNHYTQKSLSLS |
| | | | PGK |
| 2210 | CH19 | artificial | QVQLVESGGGVVQPGGSLRLSCAASGFTFSSYGMHWVRQAPGKCLEWVAFIWYEGSNK |
| | 2G6.007 CCx | | YYAESVKDRFTISRDNSKNTLYLQMNSLRAEDTAVYYCARRAGIIGTIGYYYGMDVWG |
| | I2M x scFc | | QGTTVTVSSGGGGSGGGGSGGGGSSYELTQPPSVSVSPGQTASITCSGDRLGEKYTSW |
| | delGK- | | YQQRPGQSPLLVIYQDTKRPSGIPERFSGSNSGNTATLTISGTQAMDEADYYCQAWES |
| | Full | | STVVFGCGTKLTVLSGGGGSEVQLVESGGGLVQPGGSLKLSCAASGFTFNKYAMNWVR |
| | Sequence | | QAPGKGMEWVARIRSKYNNYATYYADAVKDRFTISRDDSKNTLYLQMNNLKTEDTAVY |
| | | | YCVRAGNFGTSYISYWAYWGQGTLVTVSSGGGGSGGGGSGGGGSQTVVTQEPSLTVSP |
| | | | GGTVTITCGSSTGAVTSGNYPNWVQKKPGQAPRGLIGGTKFLAPGTPARFSGSLSGGK |
| | | | AALTLSGVQPEDEAEYYCVLWYSNRWVFGSGTKLTVLGGGGDKTHTCPPCPAPELLGG |
| | | | PSVFLFPPKPKDTLMISRTPEVTCVVVDVSHEDPEVKENWYVDGVEVHNAKTKPCEEQ |
| | | | YGSTYRCVSVLTVLHQDWLNGKEYKCKVSNKALPAPIEKTISKAKGQPREPQVYTLPP |
| | | | SREEMTKNQVSLTCLVKGFYPSDIAVEWESNGQPENNYKTTPPVLDSDGSFFLYSKLT |
| | | | VDKSRWQQGNVFSCSVMHEALHNHYTQKSLSLSPGGGGSGGGGSGGGGSGGGGSGGGG |
| | | | SGGGGSDKTHTCPPCPAPELLGGPSVFLFPPKPKDTLMISRTPEVTCVVVDVSHEDPE |
| | | | VKFNWYVDGVEVHNAKTKPCEEQYGSTYRCVSVLTVLHQDWLNGKEYKCKVSNKALPA |
| | | | PIEKTISKAKGQPREPQVYTLPPSREEMTKNQVSLTCLVKGFYPSDIAVEWESNGQPE |
| | | | NNYKTTPPVLDSDGSFFLYSKLTVDKSRWQQGNVFSCSVMHEALHNHYTQKSLSLSPG |
| | | | K |
| 2211 | CH19 | artificial | QVQLVESGGGVVQPGGSLRLSCAASGFTFSSYGMHWVRQAPGKCLEWVAFIWYEGSNK |
| | 2G6.007 CCx | | YYAESVKDRFTISRDNSKNTLYLQMNSLRAEDTAVYYCARRAGIIGTIGYYYGMDVWG |
| | I2M2 x scFc | | QGTTVTVSSGGGGSGGGGSGGGGSSYELTQPPSVSVSPGQTASITCSGDRLGEKYTSW |
| | -Full | | YQQRPGQSPLLVIYQDTKRPSGIPERFSGSNSGNTATLTISGTQAMDEADYYCQAWES |
| | Sequence | | STVVFGCGTKLTVLSGGGGSEVQLVESGGGLVQPGGSLKLSCAASGFTFNKYAINWVR |
| | | | EAPGKGLEWVARIRSKYNNYATYYADAVKDRFTISRDDSKNTAYLQMNNLKTEDTAVY |
| | | | YCVRNANFGTSYISYFAYWGQGTLVTVSSGGGGSGGGGSGGGGSQTVVTQEPSLTVSP |
| | | | GGTVTLTCGSSTGAVTSGNYPNWVQKKPGQAPRGLIGGTKFLAPGTPARFSGSLLGGK |
| | | | AALTLSGVQPEDEAEYYCVLWYSNRWVFGSGTKLTVLGGGGDKTHTCPPCPAPELLGG |
| | | | PSVFLFPPKPKDTLMISRTPEVTCVVVDVSHEDPEVKFNWYVDGVEVHNAKTKPCEEQ |
| | | | YGSTYRCVSVLTVLHQDWLNGKEYKCKVSNKALPAPIEKTISKAKGQPREPQVYTLPP |
| | | | SREEMTKNQVSLTCLVKGFYPSDIAVEWESNGQPENNYKTTPPVLDSDGSFFLYSKLT |
| | | | VDKSRWQQGNVFSCSVMHEALHNHYTQKSLSLSPGKGGGGSGGGGSGGGGSGGGGSGG |
| | | | GGSGGGGSDKTHTCPPCPAPELLGGPSVFLFPPKPKDTLMISRTPEVTCVVVDVSHED |
| | | | PEVKFNWYVDGVEVHNAKTKPCEEQYGSTYRCVSVLTVLHQDWLNGKEYKCKVSNKAL |
| | | | PAPIEKTISKAKGQPREPQVYTLPPSREEMTKNQVSLTCLVKGFYPSDIAVEWESNGQ |
| | | | PENNYKTTPPVLDSDGSFFLYSKLTVDKSRWQQGNVFSCSVMHEALHNHYTQKSLSLS |
| | | | PGK |
| 2212 | CH19 | artificial | QVQLVESGGGVVQPGGSLRLSCAASGFTFSSYGMHWVRQAPGKCLEWVAFIWYEGSNK |
| | 2G6.007 CCx | | YYAESVKDRFTISRDNSKNTLYLQMNSLRAEDTAVYYCARRAGIIGTIGYYYGMDVWG |
| | I2M2 x scFc | | QGTTVTVSSGGGGSGGGGSGGGGSSYELTQPPSVSVSPGQTASITCSGDRLGEKYTSW |
| | delGK- | | YQQRPGQSPLLVIYQDTKRPSGIPERFSGSNSGNTATLTISGTQAMDEADYYCQAWES |
| | Full | | STVVFGCGTKLTVLSGGGGSEVQLVESGGGLVQPGGSLKLSCAASGFTENKYAINWVR |
| | Sequence | | EAPGKGLEWVARIRSKYNNYATYYADAVKDRFTISRDDSKNTAYLQMNNLKTEDTAVY |
| | | | YCVRNANFGTSYISYFAYWGQGTLVTVSSGGGGSGGGGSGGGGSQTVVTQEPSLTVSP |
| | | | GGTVTLTCGSSTGAVTSGNYPNWVQKKPGQAPRGLIGGTKFLAPGTPARFSGSLLGGK |
| | | | AALTLSGVQPEDEAEYYCVLWYSNRWVFGSGTKLTVLGGGGDKTHTCPPCPAPELLGG |
| | | | PSVFLFPPKPKDTLMISRTPEVTCVVVDVSHEDPEVKENWYVDGVEVHNAKTKPCEEQ |
| | | | YGSTYRCVSVLTVLHQDWLNGKEYKCKVSNKALPAPIEKTISKAKGQPREPQVYTLPP |
| | | | SREEMTKNQVSLTCLVKGFYPSDIAVEWESNGQPENNYKTTPPVLDSDGSFFLYSKLT |
| | | | VDKSRWQQGNVFSCSVMHEALHNHYTQKSLSLSPGGGGSGGGGSGGGGSGGGGSGGGG |
| | | | SGGGGSDKTHTCPPCPAPELLGGPSVFLFPPKPKDTLMISRTPEVTCVVVDVSHEDPE |
| | | | VKFNWYVDGVEVHNAKTKPCEEQYGSTYRCVSVLTVLHQDWLNGKEYKCKVSNKALPA |
| | | | PIEKTISKAKGQPREPQVYTLPPSREEMTKNQVSLTCLVKGFYPSDIAVEWESNGQPE |
| | | | NNYKTTPPVLDSDGSFFLYSKLTVDKSRWQQGNVFSCSVMHEALHNHYTQKSLSLSPG |
| | | | K |
| 2213 | CH3 15-E11 | artificial | NYWMN |
| | CC-HCDR1 | | |
| 2214 | CH3 15-E11 | artificial | NIAYGVKGTNYNQKFQG |
| | CC-HCDR2 | | |
| 2215 | CH3 15-E11 | artificial | RYFYVMDY |
| | CC-HCDR3 | | |
| 2216 | CH3 15-E11 | artificial | RASQDISNYLN |
| | CC-LCDR1 | | |
| 2217 | CH3 15-E11 | artificial | YTSRLHS |
| | CC-LCDR2 | | |
| 2218 | CH3 15-E11 | artificial | VQYAQFPLT |
| | CC-LCDR3 | | |
| 2219 | CH3 15-E11 | artificial | QVQLVQSGAEVKKPGASVKVSCKASGYTFTNYWMNWVRQAPGQCLEWMGNIAYGVKGT |
| | CC-VH | | NYNQKFQGRVTMTVDTSSSTAYMELSRLRSDDTAVYYCATRYFYVMDYWGQGTLVTVS |
| | | | S |
| 2220 | CH3 15-E11 | artificial | DIQMTQSPSSLSASVGDRVTITCRASQDISNYLNWYQQKPGKVPKLLIYYTSRLHSGV |
| | CC-VL | | PSRFSGSGSGTDFTLTISSLQPEDVATYYCVQYAQFPLTFGCGTKVEIK |
| 2221 | CH3 15-E11 | artificial | EIQMTQSPSSLSASVGDRVTITCRASQDISNYLNWYQQKPGKVPKLLIYYTSRLHSGV |
| | CC EI GQ- | | PSRFSGSGSGTDFTLTISSLQPEDVATYYCVQYAQFPLTFGCGTKVEIK |
| | VL | | |
| 2222 | CH3 G8A 6- | artificial | SYPIN |
| | B12-HCDR1 | | |
| 2223 | CH3 G8A 6- | artificial | VIWTGGGTNYASSVKG |
| | B12-HCDR2 | | |
| 2224 | CH3 G8A 6- | artificial | SRGVYDFDGRGAMDY |
| | B12-HCDR3 | | |
| 2225 | CH3 G8A 6- | artificial | KSSQSLLYSSNQKNYFA |
| | B12-LCDR1 | | |
| 2226 | CH3 G8A 6- | artificial | WASTRES |
| | B12-LCDR2 | | |
| 2227 | CH3 G8A 6- | artificial | QQYYSYPYT |
| | B12-LCDR3 | | |
| 2228 | CH3 G8A 6- | artificial | EVQLLESGGGLVQPGGSLRLSCAASGFSFSSYPINWVRQAPGKGLEWVGVIWTGGGTN |
| | B12-VH | | YASSVKGRFTISRDNSKNTVYLQMNSLRAEDTAVYYCAKSRGVYDFDGRGAMDYWGQG |
| | | | TLVTVSS |
| 2229 | CH3 G8A 6- | artificial | DIVMTQSPDSLAVSLGERATINCKSSQSLLYSSNQKNYFAWYQQKPGQPPKLLIYWAS |
| | B12-VL | | TRESGVPDRFSGSGSGTDFTLTISSLQAEDVAVYYCQQYYSYPYTFGQGTKLEIK |
| 2230 | CH3 G8A 6- | artificial | EIVMTQSPDSLAVSLGERATINCKSSQSLLYSSNQKNYFAWYQQKPGQPPKLLIYWAS |
| | B12 EI GQ- | | TRESGVPDRFSGSGSGTDFTLTISSLQAEDVAVYYCQQYYSYPYTFGQGTKLEIK |
| | VL | | |
| 2231 | CH3 R170R | artificial | SYWMH |
| | CC-HCDR1 | | |
| 2232 | CH3 R170R | artificial | KIDPSDDYTNYNQKVKG |
| | CC-HCDR2 | | |
| 2233 | CH3 R170R | artificial | WDYSHFDV |
| | CC-HCDR3 | | |
| 2234 | CH3 R170R | artificial | RASSSVSYMH |
| | CC-LCDR1 | | |
| 2235 | CH3 R170R | artificial | GTSNLVS |
| | CC-LCDR2 | | |
| 2236 | CH3 R170R | artificial | QQWSSYPLT |
| | CC-LCDR3 | | |
| 2237 | CH3 R170R | artificial | EVQLLESGGGLVQPGGSLRLSCAASGFTFSSYWMHWVRQTPGKCLEWVSKIDPSDDYT |
| | CC-VH | | NYNQKVKGRFTISIDKSKNTLYLQMNSLRAEDTAVYYCARWDYSHFDVWGQGTTVTVS |
| | | | S |
| 2238 | CH3 R170R | artificial | EIVMTQSPATLSVSPGERATLTCRASSSVSYMHWYQQKPGQAPRLLIYGTSNLVSGVP |
| | CC-VL | | ARFSGSGSGTEFTLTISSLQSEDFAVYYCQQWSSYPLTFGCGTKVEIK |
| 2239 | CH3 15-E11 | artificial | QVQLVQSGAEVKKPGASVKVSCKASGYTFTNYWMNWVRQAPGQCLEWMGNIAYGVKGT |
| | CC x I2C x | | NYNQKFQGRVTMTVDTSSSTAYMELSRLRSDDTAVYYCATRYFYVMDYWGQGTLVTVS |
| | scFc-Full | | SGGGGSGGGGSGGGGSDIQMTQSPSSLSASVGDRVTITCRASQDISNYLNWYQQKPGK |
| | Sequence | | VPKLLIYYTSRLHSGVPSRFSGSGSGTDFTLTISSLQPEDVATYYCVQYAQFPLTFGC |
| | | | GTKVEIKSGGGGSEVQLVESGGGLVQPGGSLKLSCAASGFTFNKYAMNWVRQAPGKGL |
| | | | EWVARIRSKYNNYATYYADSVKDRFTISRDDSKNTAYLQMNNLKTEDTAVYYCVRHGN |
| | | | FGNSYISYWAYWGQGTLVTVSSGGGGSGGGGSGGGGSQTVVTQEPSLTVSPGGTVTLT |
| | | | CGSSTGAVTSGNYPNWVQQKPGQAPRGLIGGTKFLAPGTPARFSGSLLGGKAALTLSG |
| | | | VQPEDEAEYYCVLWYSNRWVFGGGTKLTVLGGGGDKTHTCPPCPAPELLGGPSVFLFP |
| | | | PKPKDTLMISRTPEVTCVVVDVSHEDPEVKENWYVDGVEVHNAKTKPCEEQYGSTYRC |
| | | | VSVLTVLHQDWLNGKEYKCKVSNKALPAPIEKTISKAKGQPREPQVYTLPPSREEMTK |
| | | | NQVSLTCLVKGFYPSDIAVEWESNGQPENNYKTTPPVLDSDGSFFLYSKLTVDKSRWQ |
| | | | QGNVFSCSVMHEALHNHYTQKSLSLSPGKGGGGSGGGGSGGGGSGGGGSGGGGSGGGG |
| | | | SDKTHTCPPCPAPELLGGPSVFLFPPKPKDTLMISRTPEVTCVVVDVSHEDPEVKENW |
| | | | YVDGVEVHNAKTKPCEEQYGSTYRCVSVLTVLHQDWLNGKEYKCKVSNKALPAPIEKT |
| | | | ISKAKGQPREPQVYTLPPSREEMTKNQVSLTCLVKGFYPSDIAVEWESNGQPENNYKT |
| | | | TPPVLDSDGSFFLYSKLTVDKSRWQQGNVFSCSVMHEALHNHYTQKSLSLSPGK |
| 2240 | CH3 15-E11 | artificial | QVQLVQSGAEVKKPGASVKVSCKASGYTFTNYWMNWVRQAPGQCLEWMGNIAYGVKGT |
| | CC x I2E x | | NYNQKFQGRVTMTVDTSSSTAYMELSRLRSDDTAVYYCATRYFYVMDYWGQGTLVTVS |
| | scFc-Full | | SGGGGSGGGGSGGGGSDIQMTQSPSSLSASVGDRVTITCRASQDISNYLNWYQQKPGK |
| | Sequence | | VPKLLIYYTSRLHSGVPSRFSGSGSGTDFTLTISSLQPEDVATYYCVQYAQFPLTFGC |
| | | | GTKVEIKSGGGGSEVQLVESGGGLVQPGGSLKLSCAASGFTFNKYAINWVRQAPGKGL |
| | | | EWVARIRSKYNNYATYYADAVKDRFTISRDDSKNTVYLQMNNLKTEDTAVYYCARAGN |
| | | | FGSSYISYWAYWGQGTLVTVSSGGGGSGGGGSGGGGSQTVVTQEPSLTVSPGGTVTIT |
| | | | CGSSTGAVTSGNYPNWVQKKPGQAPRGLIGGTKFLAPGTPARFSGSLSGGKAALTLSG |
| | | | VQPEDEAEYYCVLWYSNRWVFGSGTKLTVLGGGGDKTHTCPPCPAPELLGGPSVFLFP |
| | | | PKPKDTLMISRTPEVTCVVVDVSHEDPEVKFNWYVDGVEVHNAKTKPCEEQYGSTYRC |
| | | | VSVLTVLHQDWLNGKEYKCKVSNKALPAPIEKTISKAKGQPREPQVYTLPPSREEMTK |
| | | | NQVSLTCLVKGFYPSDIAVEWESNGQPENNYKTTPPVLDSDGSFFLYSKLTVDKSRWQ |
| | | | QGNVFSCSVMHEALHNHYTQKSLSLSPGKGGGGSGGGGSGGGGSGGGGSGGGGSGGGG |
| | | | SDKTHTCPPCPAPELLGGPSVFLFPPKPKDTLMISRTPEVTCVVVDVSHEDPEVKENW |
| | | | YVDGVEVHNAKTKPCEEQYGSTYRCVSVLTVLHQDWLNGKEYKCKVSNKALPAPIEKT |
| | | | ISKAKGQPREPQVYTLPPSREEMTKNQVSLTCLVKGFYPSDIAVEWESNGQPENNYKT |
| | | | TPPVLDSDGSFFLYSKLTVDKSRWQQGNVFSCSVMHEALHNHYTQKSLSLSPGK |
| 2241 | CH3 15-E11 | artificial | QVQLVQSGAEVKKPGASVKVSCKASGYTFTNYWMNWVRQAPGQCLEWMGNIAYGVKGT |
| | CC x I2K x | | NYNQKFQGRVTMTVDTSSSTAYMELSRLRSDDTAVYYCATRYFYVMDYWGQGTLVTVS |
| | scFc-Full | | SGGGGSGGGGSGGGGSDIQMTQSPSSLSASVGDRVTITCRASQDISNYLNWYQQKPGK |
| | Sequence | | VPKLLIYYTSRLHSGVPSRFSGSGSGTDFTLTISSLQPEDVATYYCVQYAQFPLTFGC |
| | | | GTKVEIKSGGGGSEVQLVESGGGLVQPGGSLKLSCAASGFTFNKYAMNWVRQAPGKGL |
| | | | EWVARIRSKYNNYATYYAEAVKGRFTISRDDSKNTVYLQMNNLKTEDTAVYYCVRNEN |
| | | | IGTSYISYWAYWGQGTLVTVSSGGGGSGGGGSGGGGSQTVVTQEPSLTVSPGGTVTIT |
| | | | CGSSTGAVTSGNYPNWVQQKPGQAPRGLIGGTKFLAPGTPARFSGSLSGGKAALTLSG |
| | | | VQPEDEAEYYCVLWYSNRWVFGSGTKLTVLGGGGDKTHTCPPCPAPELLGGPSVFLFP |
| | | | PKPKDTLMISRTPEVTCVVVDVSHEDPEVKENWYVDGVEVHNAKTKPCEEQYGSTYRC |
| | | | VSVLTVLHQDWLNGKEYKCKVSNKALPAPIEKTISKAKGQPREPQVYTLPPSREEMTK |
| | | | NQVSLTCLVKGFYPSDIAVEWESNGQPENNYKTTPPVLDSDGSFFLYSKLTVDKSRWQ |
| | | | QGNVFSCSVMHEALHNHYTQKSLSLSPGKGGGGSGGGGSGGGGSGGGGSGGGGSGGGG |
| | | | SDKTHTCPPCPAPELLGGPSVFLFPPKPKDTLMISRTPEVTCVVVDVSHEDPEVKENW |
| | | | YVDGVEVHNAKTKPCEEQYGSTYRCVSVLTVLHQDWLNGKEYKCKVSNKALPAPIEKT |
| | | | ISKAKGQPREPQVYTLPPSREEMTKNQVSLTCLVKGFYPSDIAVEWESNGQPENNYKT |
| | | | TPPVLDSDGSFFLYSKLTVDKSRWQQGNVFSCSVMHEALHNHYTQKSLSLSPGK |
| 2242 | CH3 15-E11 | artificial | QVQLVQSGAEVKKPGASVKVSCKASGYTFTNYWMNWVRQAPGQCLEWMGNIAYGVKGT |
| | CC x I2L x | | NYNQKFQGRVTMTVDTSSSTAYMELSRLRSDDTAVYYCATRYFYVMDYWGQGTLVTVS |
| | ScFc-Full | | SGGGGSGGGGSGGGGSDIQMTQSPSSLSASVGDRVTITCRASQDISNYLNWYQQKPGK |
| | Sequence | | VPKLLIYYTSRLHSGVPSRFSGSGSGTDFTLTISSLQPEDVATYYCVQYAQFPLTFGC |
| | | | GTKVEIKSGGGGSEVQLVESGGGLVQPGGSLKLSCAASGFTFNKYAMNWVRQAPGKGM |
| | | | EWVARIRSKYNNYATYYADAVKDRFTISRDDSKNTLYLQMNNLKTEDTAVYYCVRAGN |
| | | | FGSSYISYFAYWGQGTLVTVSSGGGGSGGGGSGGGGSQTVVTQEPSLTVSPGGTVTIT |
| | | | CGSSTGAVTSGNYPNWIQKKPGQAPRGLIGGTKFLAPGTPARFSGSLEGGKAALTLSG |
| | | | VQPEDEAEYYCVLYYSNRWVFGSGTKLTVLGGGGDKTHTCPPCPAPELLGGPSVFLFP |
| | | | PKPKDTLMISRTPEVTCVVVDVSHEDPEVKFNWYVDGVEVHNAKTKPCEEQYGSTYRC |
| | | | VSVLTVLHQDWLNGKEYKCKVSNKALPAPIEKTISKAKGQPREPQVYTLPPSREEMTK |
| | | | NQVSLTCLVKGFYPSDIAVEWESNGQPENNYKTTPPVLDSDGSFFLYSKLTVDKSRWQ |
| | | | QGNVFSCSVMHEALHNHYTQKSLSLSPGKGGGGSGGGGSGGGGGGGGSGGGGSGGGG |
| | | | SDKTHTCPPCPAPELLGGPSVFLFPPKPKDTLMISRTPEVTCVVVDVSHEDPEVKENW |
| | | | YVDGVEVHNAKTKPCEEQYGSTYRCVSVLTVLHQDWLNGKEYKCKVSNKALPAPIEKT |
| | | | ISKAKGQPREPQVYTLPPSREEMTKNQVSLTCLVKGFYPSDIAVEWESNGQPENNYKT |
| | | | TPPVLDSDGSFFLYSKLTVDKSRWQQGNVFSCSVMHEALHNHYTQKSLSLSPGK |
| 2243 | CH3 15-E11 | artificial | QVQLVQSGAEVKKPGASVKVSCKASGYTFTNYWMNWVRQAPGQCLEWMGNIAYGVKGT |
| | CC x I2M x | | NYNQKFQGRVTMTVDTSSSTAYMELSRLRSDDTAVYYCATRYFYVMDYWGQGTLVTVS |
| | scFc-Full | | SGGGGSGGGGSGGGGSDIQMTQSPSSLSASVGDRVTITCRASQDISNYLNWYQQKPGK |
| | Sequence | | VPKLLIYYTSRLHSGVPSRFSGSGSGTDFTLTISSLQPEDVATYYCVQYAQFPLTFGC |
| | | | GTKVEIKSGGGGSEVQLVESGGGLVQPGGSLKLSCAASGFTFNKYAMNWVRQAPGKGM |
| | | | EWVARIRSKYNNYATYYADAVKDRFTISRDDSKNTLYLQMNNLKTEDTAVYYCVRAGN |
| | | | FGTSYISYWAYWGQGTLVTVSSGGGGSGGGGSGGGGSQTVVTQEPSLTVSPGGTVTIT |
| | | | CGSSTGAVTSGNYPNWVQKKPGQAPRGLIGGTKFLAPGTPARFSGSLSGGKAALTLSG |
| | | | VQPEDEAEYYCVLWYSNRWVFGSGTKLTVLGGGGDKTHTCPPCPAPELLGGPSVFLFP |
| | | | PKPKDTLMISRTPEVTCVVVDVSHEDPEVKENWYVDGVEVHNAKTKPCEEQYGSTYRC |
| | | | VSVLTVLHQDWLNGKEYKCKVSNKALPAPIEKTISKAKGQPREPQVYTLPPSREEMTK |
| | | | NQVSLTCLVKGFYPSDIAVEWESNGQPENNYKTTPPVLDSDGSFFLYSKLTVDKSRWQ |
| | | | QGNVFSCSVMHEALHNHYTQKSLSLSPGKGGGGSGGGGSGGGGSGGGGSGGGGSGGGG |
| | | | SDKTHTCPPCPAPELLGGPSVFLFPPKPKDTLMISRTPEVTCVVVDVSHEDPEVKENW |
| | | | YVDGVEVHNAKTKPCEEQYGSTYRCVSVLTVLHQDWLNGKEYKCKVSNKALPAPIEKT |
| | | | ISKAKGQPREPQVYTLPPSREEMTKNQVSLTCLVKGFYPSDIAVEWESNGQPENNYKT |
| | | | TPPVLDSDGSFFLYSKLTVDKSRWQQGNVFSCSVMHEALHNHYTQKSLSLSPGK |
| 2244 | CH3 15-E11 | artificial | QVQLVQSGAEVKKPGASVKVSCKASGYTFTNYWMNWVRQAPGQCLEWMGNIAYGVKGT |
| | CC x I2M2 x | | NYNQKFQGRVTMTVDTSSSTAYMELSRLRSDDTAVYYCATRYFYVMDYWGQGTLVTVS |
| | scFc-Full | | SGGGGSGGGGSGGGGSDIQMTQSPSSLSASVGDRVTITCRASQDISNYLNWYQQKPGK |
| | Sequence | | VPKLLIYYTSRLHSGVPSRFSGSGSGTDFTLTISSLQPEDVATYYCVQYAQFPLTFGC |
| | | | GTKVEIKSGGGGSEVQLVESGGGLVQPGGSLKLSCAASGFTFNKYAINWVREAPGKGL |
| | | | EWVARIRSKYNNYATYYADAVKDRFTISRDDSKNTAYLQMNNLKTEDTAVYYCVRNAN |
| | | | FGTSYISYFAYWGQGTLVTVSSGGGGSGGGGSGGGGSQTVVTQEPSLTVSPGGTVTLT |
| | | | CGSSTGAVTSGNYPNWVQKKPGQAPRGLIGGTKFLAPGTPARFSGSLLGGKAALTLSG |
| | | | VQPEDEAEYYCVLWYSNRWVFGSGTKLTVLGGGGDKTHTCPPCPAPELLGGPSVFLFP |
| | | | PKPKDTLMISRTPEVTCVVVDVSHEDPEVKFNWYVDGVEVHNAKTKPCEEQYGSTYRC |
| | | | VSVLTVLHQDWLNGKEYKCKVSNKALPAPIEKTISKAKGQPREPQVYTLPPSREEMTK |
| | | | NQVSLTCLVKGFYPSDIAVEWESNGQPENNYKTTPPVLDSDGSFFLYSKLTVDKSRWQ |
| | | | QGNVFSCSVMHEALHNHYTQKSLSLSPGKGGGGSGGGGSGGGGSGGGGSGGGGSGGGG |
| | | | SDKTHTCPPCPAPELLGGPSVFLFPPKPKDTLMISRTPEVTCVVVDVSHEDPEVKENW |
| | | | YVDGVEVHNAKTKPCEEQYGSTYRCVSVLTVLHQDWLNGKEYKCKVSNKALPAPIEKT |
| | | | ISKAKGQPREPQVYTLPPSREEMTKNQVSLTCLVKGFYPSDIAVEWESNGQPENNYKT |
| | | | TPPVLDSDGSFFLYSKLTVDKSRWQQGNVFSCSVMHEALHNHYTQKSLSLSPGK |
| 2245 | CH3 G8A 6- | artificial | EVQLLESGGGLVQPGGSLRLSCAASGFSFSSYPINWVRQAPGKGLEWVGVIWTGGGTN |
| | B12 x I2C x | | YASSVKGRFTISRDNSKNTVYLQMNSLRAEDTAVYYCAKSRGVYDFDGRGAMDYWGQG |
| | scFc-Full | | TLVTVSSGGGGSGGGGSGGGGSDIVMTQSPDSLAVSLGERATINCKSSQSLLYSSNQK |
| | Sequence | | NYFAWYQQKPGQPPKLLIYWASTRESGVPDRFSGSGSGTDFTLTISSLQAEDVAVYYC |
| | | | QQYYSYPYTFGQGTKLEIKSGGGGSEVQLVESGGGLVQPGGSLKLSCAASGFTENKYA |
| | | | MNWVRQAPGKGLEWVARIRSKYNNYATYYADSVKDRFTISRDDSKNTAYLQMNNLKTE |
| | | | DTAVYYCVRHGNFGNSYISYWAYWGQGTLVTVSSGGGGSGGGGSGGGGSQTVVTQEPS |
| | | | LTVSPGGTVTLTCGSSTGAVTSGNYPNWVQQKPGQAPRGLIGGTKFLAPGTPARFSGS |
| | | | LLGGKAALTLSGVQPEDEAEYYCVLWYSNRWVFGGGTKLTVLGGGGDKTHTCPPCPAP |
| | | | ELLGGPSVFLFPPKPKDTLMISRTPEVTCVVVDVSHEDPEVKENWYVDGVEVHNAKTK |
| | | | PCEEQYGSTYRCVSVLTVLHQDWLNGKEYKCKVSNKALPAPIEKTISKAKGQPREPQV |
| | | | YTLPPSREEMTKNQVSLTCLVKGFYPSDIAVEWESNGQPENNYKTTPPVLDSDGSFFL |
| | | | YSKLTVDKSRWQQGNVFSCSVMHEALHNHYTQKSLSLSPGKGGGGSGGGGSGGGGSGG |
| | | | GGSGGGGSGGGGSDKTHTCPPCPAPELLGGPSVFLFPPKPKDTLMISRTPEVTCVVVD |
| | | | VSHEDPEVKFNWYVDGVEVHNAKTKPCEEQYGSTYRCVSVLTVLHQDWLNGKEYKCKV |
| | | | SNKALPAPIEKTISKAKGQPREPQVYTLPPSREEMTKNQVSLTCLVKGFYPSDIAVEW |
| | | | ESNGQPENNYKTTPPVLDSDGSFFLYSKLTVDKSRWQQGNVFSCSVMHEALHNHYTQK |
| | | | SLSLSPGK |
| 2246 | CH3 G8A 6- | artificial | EVQLLESGGGLVQPGGSLRLSCAASGFSFSSYPINWVRQAPGKGLEWVGVIWTGGGTN |
| | B12 x I2E x | | YASSVKGRFTISRDNSKNTVYLQMNSLRAEDTAVYYCAKSRGVYDFDGRGAMDYWGQG |
| | scFc-Full | | TLVTVSSGGGGSGGGGSGGGGSDIVMTQSPDSLAVSLGERATINCKSSQSLLYSSNQK |
| | Sequence | | NYFAWYQQKPGQPPKLLIYWASTRESGVPDRFSGSGSGTDFTLTISSLQAEDVAVYYC |
| | | | QQYYSYPYTFGQGTKLEIKSGGGGSEVQLVESGGGLVQPGGSLKLSCAASGFTENKYA |
| | | | INWVRQAPGKGLEWVARIRSKYNNYATYYADAVKDRFTISRDDSKNTVYLQMNNLKTE |
| | | | DTAVYYCARAGNFGSSYISYWAYWGQGTLVTVSSGGGGSGGGGSGGGGSQTVVTQEPS |
| | | | LTVSPGGTVTITCGSSTGAVTSGNYPNWVQKKPGQAPRGLIGGTKFLAPGTPARFSGS |
| | | | LSGGKAALTLSGVQPEDEAEYYCVLWYSNRWVFGSGTKLTVLGGGGDKTHTCPPCPAP |
| | | | ELLGGPSVFLFPPKPKDTLMISRTPEVTCVVVDVSHEDPEVKFNWYVDGVEVHNAKTK |
| | | | PCEEQYGSTYRCVSVLTVLHQDWLNGKEYKCKVSNKALPAPIEKTISKAKGQPREPQV |
| | | | YTLPPSREEMTKNQVSLTCLVKGFYPSDIAVEWESNGQPENNYKTTPPVLDSDGSFFL |
| | | | YSKLTVDKSRWQQGNVFSCSVMHEALHNHYTQKSLSLSPGKGGGGSGGGGSGGGGSGG |
| | | | GGSGGGGSGGGGSDKTHTCPPCPAPELLGGPSVFLFPPKPKDTLMISRTPEVTCVVVD |
| | | | VSHEDPEVKFNWYVDGVEVHNAKTKPCEEQYGSTYRCVSVLTVLHQDWLNGKEYKCKV |
| | | | SNKALPAPIEKTISKAKGQPREPQVYTLPPSREEMTKNQVSLTCLVKGFYPSDIAVEW |
| | | | ESNGQPENNYKTTPPVLDSDGSFFLYSKLTVDKSRWQQGNVFSCSVMHEALHNHYTQK |
| | | | SLSLSPGK |
| 2247 | CH3 G8A 6- | artificial | EVQLLESGGGLVQPGGSLRLSCAASGFSFSSYPINWVRQAPGKGLEWVGVIWTGGGTN |
| | B12 x I2K x | | YASSVKGRFTISRDNSKNTVYLQMNSLRAEDTAVYYCAKSRGVYDFDGRGAMDYWGQG |
| | scFc-Full | | TLVTVSSGGGGSGGGGSGGGGSDIVMTQSPDSLAVSLGERATINCKSSQSLLYSSNQK |
| | Sequence | | NYFAWYQQKPGQPPKLLIYWASTRESGVPDRFSGSGSGTDFTLTISSLQAEDVAVYYC |
| | | | QQYYSYPYTFGQGTKLEIKSGGGGSEVQLVESGGGLVQPGGSLKLSCAASGFTENKYA |
| | | | MNWVRQAPGKGLEWVARIRSKYNNYATYYAEAVKGRFTISRDDSKNTVYLQMNNLKTE |
| | | | DTAVYYCVRNENIGTSYISYWAYWGQGTLVTVSSGGGGSGGGGSGGGGSQTVVTQEPS |
| | | | LTVSPGGTVTITCGSSTGAVTSGNYPNWVQQKPGQAPRGLIGGTKFLAPGTPARFSGS |
| | | | LSGGKAALTLSGVQPEDEAEYYCVLWYSNRWVFGSGTKLTVLGGGGDKTHTCPPCPAP |
| | | | ELLGGPSVFLFPPKPKDTLMISRTPEVTCVVVDVSHEDPEVKENWYVDGVEVHNAKTK |
| | | | PCEEQYGSTYRCVSVLTVLHQDWLNGKEYKCKVSNKALPAPIEKTISKAKGQPREPQV |
| | | | YTLPPSREEMTKNQVSLTCLVKGFYPSDIAVEWESNGQPENNYKTTPPVLDSDGSFFL |
| | | | YSKLTVDKSRWQQGNVFSCSVMHEALHNHYTQKSLSLSPGKGGGGSGGGGSGGGGSGG |
| | | | GGSGGGGSGGGGSDKTHTCPPCPAPELLGGPSVFLFPPKPKDTLMISRTPEVTCVVVD |
| | | | VSHEDPEVKFNWYVDGVEVHNAKTKPCEEQYGSTYRCVSVLTVLHQDWLNGKEYKCKV |
| | | | SNKALPAPIEKTISKAKGQPREPQVYTLPPSREEMTKNQVSLTCLVKGFYPSDIAVEW |
| | | | ESNGQPENNYKTTPPVLDSDGSFFLYSKLTVDKSRWQQGNVFSCSVMHEALHNHYTQK |
| | | | SLSLSPGK |
| 2248 | CH3 G8A 6- | artificial | EVQLLESGGGLVQPGGSLRLSCAASGFSFSSYPINWVRQAPGKGLEWVGVIWTGGGTN |
| | B12 x I2L x | | YASSVKGRFTISRDNSKNTVYLQMNSLRAEDTAVYYCAKSRGVYDFDGRGAMDYWGQG |
| | scFc-Full | | TLVTVSSGGGGSGGGGSGGGGSDIVMTQSPDSLAVSLGERATINCKSSQSLLYSSNQK |
| | Sequence | | NYFAWYQQKPGQPPKLLIYWASTRESGVPDRFSGSGSGTDFTLTISSLQAEDVAVYYC |
| | | | QQYYSYPYTFGQGTKLEIKSGGGGSEVQLVESGGGLVQPGGSLKLSCAASGFTENKYA |
| | | | MNWVRQAPGKGMEWVARIRSKYNNYATYYADAVKDRFTISRDDSKNTLYLQMNNLKTE |
| | | | DTAVYYCVRAGNFGSSYISYFAYWGQGTLVTVSSGGGGSGGGGSGGGGSQTVVTQEPS |
| | | | LTVSPGGTVTITCGSSTGAVTSGNYPNWIQKKPGQAPRGLIGGTKFLAPGTPARFSGS |
| | | | LEGGKAALTLSGVQPEDEAEYYCVLYYSNRWVFGSGTKLTVLGGGGDKTHTCPPCPAP |
| | | | ELLGGPSVFLFPPKPKDTLMISRTPEVTCVVVDVSHEDPEVKENWYVDGVEVHNAKTK |
| | | | PCEEQYGSTYRCVSVLTVLHQDWLNGKEYKCKVSNKALPAPIEKTISKAKGQPREPQV |
| | | | YTLPPSREEMTKNQVSLTCLVKGFYPSDIAVEWESNGQPENNYKTTPPVLDSDGSFFL |
| | | | YSKLTVDKSRWQQGNVFSCSVMHEALHNHYTQKSLSLSPGKGGGGSGGGGSGGGGSGG |
| | | | GGSGGGGSGGGGSDKTHTCPPCPAPELLGGPSVFLFPPKPKDTLMISRTPEVTCVVVD |
| | | | VSHEDPEVKFNWYVDGVEVHNAKTKPCEEQYGSTYRCVSVLTVLHQDWLNGKEYKCKV |
| | | | SNKALPAPIEKTISKAKGQPREPQVYTLPPSREEMTKNQVSLTCLVKGFYPSDIAVEW |
| | | | ESNGQPENNYKTTPPVLDSDGSFFLYSKLTVDKSRWQQGNVFSCSVMHEALHNHYTQK |
| | | | SLSLSPGK |
| 2249 | CH3 G8A 6- | artificial | EVQLLESGGGLVQPGGSLRLSCAASGFSFSSYPINWVRQAPGKGLEWVGVIWTGGGTN |
| | B12 x I2M x | | YASSVKGRFTISRDNSKNTVYLQMNSLRAEDTAVYYCAKSRGVYDFDGRGAMDYWGQG |
| | scFc-Full | | TLVTVSSGGGGSGGGGSGGGGSDIVMTQSPDSLAVSLGERATINCKSSQSLLYSSNQK |
| | Sequence | | NYFAWYQQKPGQPPKLLIYWASTRESGVPDRFSGSGSGTDFTLTISSLQAEDVAVYYC |
| | | | QQYYSYPYTFGQGTKLEIKSGGGGSEVQLVESGGGLVQPGGSLKLSCAASGFTENKYA |
| | | | MNWVRQAPGKGMEWVARIRSKYNNYATYYADAVKDRFTISRDDSKNTLYLQMNNLKTE |
| | | | DTAVYYCVRAGNFGTSYISYWAYWGQGTLVTVSSGGGGSGGGGSGGGGSQTVVTQEPS |
| | | | LTVSPGGTVTITCGSSTGAVTSGNYPNWVQKKPGQAPRGLIGGTKFLAPGTPARFSGS |
| | | | LSGGKAALTLSGVQPEDEAEYYCVLWYSNRWVFGSGTKLTVLGGGGDKTHTCPPCPAP |
| | | | ELLGGPSVFLFPPKPKDTLMISRTPEVTCVVVDVSHEDPEVKENWYVDGVEVHNAKTK |
| | | | PCEEQYGSTYRCVSVLTVLHQDWLNGKEYKCKVSNKALPAPIEKTISKAKGQPREPQV |
| | | | YTLPPSREEMTKNQVSLTCLVKGFYPSDIAVEWESNGQPENNYKTTPPVLDSDGSFFL |
| | | | YSKLTVDKSRWQQGNVFSCSVMHEALHNHYTQKSLSLSPGKGGGGSGGGGSGGGGSGG |
| | | | GGSGGGGSGGGGSDKTHTCPPCPAPELLGGPSVFLFPPKPKDTLMISRTPEVTCVVVD |
| | | | VSHEDPEVKFNWYVDGVEVHNAKTKPCEEQYGSTYRCVSVLTVLHQDWLNGKEYKCKV |
| | | | SNKALPAPIEKTISKAKGQPREPQVYTLPPSREEMTKNQVSLTCLVKGFYPSDIAVEW |
| | | | ESNGQPENNYKTTPPVLDSDGSFFLYSKLTVDKSRWQQGNVFSCSVMHEALHNHYTQK |
| | | | SLSLSPGK |
| 2250 | CH3 G8A 6- | artificial | EVQLLESGGGLVQPGGSLRLSCAASGFSFSSYPINWVRQAPGKGLEWVGVIWTGGGTN |
| | B12 x I2M2 | | YASSVKGRFTISRDNSKNTVYLQMNSLRAEDTAVYYCAKSRGVYDFDGRGAMDYWGQG |
| | x scFc- | | TLVTVSSGGGGSGGGGSGGGGSDIVMTQSPDSLAVSLGERATINCKSSQSLLYSSNQK |
| | Full | | NYFAWYQQKPGQPPKLLIYWASTRESGVPDRFSGSGSGTDFTLTISSLQAEDVAVYYC |
| | Sequence | | QQYYSYPYTFGQGTKLEIKSGGGGSEVQLVESGGGLVQPGGSLKLSCAASGFTENKYA |
| | | | INWVREAPGKGLEWVARIRSKYNNYATYYADAVKDRFTISRDDSKNTAYLQMNNLKTE |
| | | | DTAVYYCVRNANFGTSYISYFAYWGQGTLVTVSSGGGGSGGGGSGGGGSQTVVTQEPS |
| | | | LTVSPGGTVTLTCGSSTGAVTSGNYPNWVQKKPGQAPRGLIGGTKFLAPGTPARFSGS |
| | | | LLGGKAALTLSGVQPEDEAEYYCVLWYSNRWVFGSGTKLTVLGGGGDKTHTCPPCPAP |
| | | | ELLGGPSVFLFPPKPKDTLMISRTPEVTCVVVDVSHEDPEVKENWYVDGVEVHNAKTK |
| | | | PCEEQYGSTYRCVSVLTVLHQDWLNGKEYKCKVSNKALPAPIEKTISKAKGQPREPQV |
| | | | YTLPPSREEMTKNQVSLTCLVKGFYPSDIAVEWESNGQPENNYKTTPPVLDSDGSFFL |
| | | | YSKLTVDKSRWQQGNVFSCSVMHEALHNHYTQKSLSLSPGKGGGGSGGGGSGGGGSGG |
| | | | GGSGGGGSGGGGSDKTHTCPPCPAPELLGGPSVFLFPPKPKDTLMISRTPEVTCVVVD |
| | | | VSHEDPEVKFNWYVDGVEVHNAKTKPCEEQYGSTYRCVSVLTVLHQDWLNGKEYKCKV |
| | | | SNKALPAPIEKTISKAKGQPREPQVYTLPPSREEMTKNQVSLTCLVKGFYPSDIAVEW |
| | | | ESNGQPENNYKTTPPVLDSDGSFFLYSKLTVDKSRWQQGNVFSCSVMHEALHNHYTQK |
| | | | SLSLSPGK |
| 2251 | CH3 R170R | artificial | EVQLLESGGGLVQPGGSLRLSCAASGFTFSSYWMHWVRQTPGKCLEWVSKIDPSDDYT |
| | CC x I2C x | | NYNQKVKGRFTISIDKSKNTLYLQMNSLRAEDTAVYYCARWDYSHFDVWGQGTTVTVS |
| | scFc-Full | | SGGGGSGGGGSGGGGSEIVMTQSPATLSVSPGERATLTCRASSSVSYMHWYQQKPGQA |
| | Sequence | | PRLLIYGTSNLVSGVPARFSGSGSGTEFTLTISSLQSEDFAVYYCQQWSSYPLTFGCG |
| | | | TKVEIKSGGGGSEVQLVESGGGLVQPGGSLKLSCAASGFTFNKYAMNWVRQAPGKGLE |
| | | | WVARIRSKYNNYATYYADSVKDRFTISRDDSKNTAYLQMNNLKTEDTAVYYCVRHGNF |
| | | | GNSYISYWAYWGQGTLVTVSSGGGGSGGGGSGGGGSQTVVTQEPSLTVSPGGTVTLTC |
| | | | GSSTGAVTSGNYPNWVQQKPGQAPRGLIGGTKFLAPGTPARFSGSLLGGKAALTLSGV |
| | | | QPEDEAEYYCVLWYSNRWVFGGGTKLTVLGGGGDKTHTCPPCPAPELLGGPSVFLFPP |
| | | | KPKDTLMISRTPEVTCVVVDVSHEDPEVKENWYVDGVEVHNAKTKPCEEQYGSTYRCV |
| | | | SVLTVLHQDWLNGKEYKCKVSNKALPAPIEKTISKAKGQPREPQVYTLPPSREEMTKN |
| | | | QVSLTCLVKGFYPSDIAVEWESNGQPENNYKTTPPVLDSDGSFFLYSKLTVDKSRWQQ |
| | | | GNVFSCSVMHEALHNHYTQKSLSLSPGKGGGGSGGGGSGGGGSGGGGSGGGGSGGGGS |
| | | | DKTHTCPPCPAPELLGGPSVFLFPPKPKDTLMISRTPEVTCVVVDVSHEDPEVKENWY |
| | | | VDGVEVHNAKTKPCEEQYGSTYRCVSVLTVLHQDWLNGKEYKCKVSNKALPAPIEKTI |
| | | | SKAKGQPREPQVYTLPPSREEMTKNQVSLTCLVKGFYPSDIAVEWESNGQPENNYKTT |
| | | | PPVLDSDGSFFLYSKLTVDKSRWQQGNVFSCSVMHEALHNHYTQKSLSLSPGK |
| 2252 | CH3 R170R | artificial | EVQLLESGGGLVQPGGSLRLSCAASGFTFSSYWMHWVRQTPGKCLEWVSKIDPSDDYT |
| | CC x I2E x | | NYNQKVKGRFTISIDKSKNTLYLQMNSLRAEDTAVYYCARWDYSHFDVWGQGTTVTVS |
| | scFc-Full | | SGGGGSGGGGSGGGGSEIVMTQSPATLSVSPGERATLTCRASSSVSYMHWYQQKPGQA |
| | Sequence | | PRLLIYGTSNLVSGVPARFSGSGSGTEFTLTISSLQSEDFAVYYCQQWSSYPLTFGCG |
| | | | TKVEIKSGGGGSEVQLVESGGGLVQPGGSLKLSCAASGFTFNKYAINWVRQAPGKGLE |
| | | | WVARIRSKYNNYATYYADAVKDRFTISRDDSKNTVYLQMNNLKTEDTAVYYCARAGNF |
| | | | GSSYISYWAYWGQGTLVTVSSGGGGSGGGGSGGGGSQTVVTQEPSLTVSPGGTVTITC |
| | | | GSSTGAVTSGNYPNWVQKKPGQAPRGLIGGTKFLAPGTPARFSGSLSGGKAALTLSGV |
| | | | QPEDEAEYYCVLWYSNRWVFGSGTKLTVLGGGGDKTHTCPPCPAPELLGGPSVFLFPP |
| | | | KPKDTLMISRTPEVTCVVVDVSHEDPEVKENWYVDGVEVHNAKTKPCEEQYGSTYRCV |
| | | | SVLTVLHQDWLNGKEYKCKVSNKALPAPIEKTISKAKGQPREPQVYTLPPSREEMTKN |
| | | | QVSLTCLVKGFYPSDIAVEWESNGQPENNYKTTPPVLDSDGSFFLYSKLTVDKSRWQQ |
| | | | GNVFSCSVMHEALHNHYTQKSLSLSPGKGGGGSGGGGSGGGGSGGGGSGGGGSGGGGS |
| | | | DKTHTCPPCPAPELLGGPSVFLFPPKPKDTLMISRTPEVTCVVVDVSHEDPEVKENWY |
| | | | VDGVEVHNAKTKPCEEQYGSTYRCVSVLTVLHQDWLNGKEYKCKVSNKALPAPIEKTI |
| | | | SKAKGQPREPQVYTLPPSREEMTKNQVSLTCLVKGFYPSDIAVEWESNGQPENNYKTT |
| | | | PPVLDSDGSFFLYSKLTVDKSRWQQGNVFSCSVMHEALHNHYTQKSLSLSPGK |
| 2253 | CH3 R170R | artificial | EVQLLESGGGLVQPGGSLRLSCAASGFTFSSYWMHWVRQTPGKCLEWVSKIDPSDDYT |
| | CC x I2K x | | NYNQKVKGRFTISIDKSKNTLYLQMNSLRAEDTAVYYCARWDYSHFDVWGQGTTVTVS |
| | scFc-Full | | SGGGGSGGGGSGGGGSEIVMTQSPATLSVSPGERATLTCRASSSVSYMHWYQQKPGQA |
| | Sequence | | PRLLIYGTSNLVSGVPARFSGSGSGTEFTLTISSLQSEDFAVYYCQQWSSYPLTFGCG |
| | | | TKVEIKSGGGGSEVQLVESGGGLVQPGGSLKLSCAASGFTFNKYAMNWVRQAPGKGLE |
| | | | WVARIRSKYNNYATYYAEAVKGRFTISRDDSKNTVYLQMNNLKTEDTAVYYCVRNENI |
| | | | GTSYISYWAYWGQGTLVTVSSGGGGSGGGGSGGGGSQTVVTQEPSLTVSPGGTVTITC |
| | | | GSSTGAVTSGNYPNWVQQKPGQAPRGLIGGTKFLAPGTPARFSGSLSGGKAALTLSGV |
| | | | QPEDEAEYYCVLWYSNRWVFGSGTKLTVLGGGGDKTHTCPPCPAPELLGGPSVFLFPP |
| | | | KPKDTLMISRTPEVTCVVVDVSHEDPEVKFNWYVDGVEVHNAKTKPCEEQYGSTYRCV |
| | | | SVLTVLHQDWLNGKEYKCKVSNKALPAPIEKTISKAKGQPREPQVYTLPPSREEMTKN |
| | | | QVSLTCLVKGFYPSDIAVEWESNGQPENNYKTTPPVLDSDGSFFLYSKLTVDKSRWQQ |
| | | | GNVFSCSVMHEALHNHYTQKSLSLSPGKGGGGSGGGGSGGGGSGGGGSGGGGSGGGGS |
| | | | DKTHTCPPCPAPELLGGPSVFLFPPKPKDTLMISRTPEVTCVVVDVSHEDPEVKENWY |
| | | | VDGVEVHNAKTKPCEEQYGSTYRCVSVLTVLHQDWLNGKEYKCKVSNKALPAPIEKTI |
| | | | SKAKGQPREPQVYTLPPSREEMTKNQVSLTCLVKGFYPSDIAVEWESNGQPENNYKTT |
| | | | PPVLDSDGSFFLYSKLTVDKSRWQQGNVFSCSVMHEALHNHYTQKSLSLSPGK |
| 2254 | CH3 R170R | artificial | EVQLLESGGGLVQPGGSLRLSCAASGFTFSSYWMHWVRQTPGKCLEWVSKIDPSDDYT |
| | CC x I2L x | | NYNQKVKGRFTISIDKSKNTLYLQMNSLRAEDTAVYYCARWDYSHFDVWGQGTTVTVS |
| | scFc-Full | | SGGGGSGGGGSGGGGSEIVMTQSPATLSVSPGERATLTCRASSSVSYMHWYQQKPGQA |
| | Sequence | | PRLLIYGTSNLVSGVPARFSGSGSGTEFTLTISSLQSEDFAVYYCQQWSSYPLTFGCG |
| | | | TKVEIKSGGGGSEVQLVESGGGLVQPGGSLKLSCAASGFTFNKYAMNWVRQAPGKGME |
| | | | WVARIRSKYNNYATYYADAVKDRFTISRDDSKNTLYLQMNNLKTEDTAVYYCVRAGNF |
| | | | GSSYISYFAYWGQGTLVTVSSGGGGSGGGGSGGGGSQTVVTQEPSLTVSPGGTVTITC |
| | | | GSSTGAVTSGNYPNWIQKKPGQAPRGLIGGTKFLAPGTPARFSGSLEGGKAALTLSGV |
| | | | QPEDEAEYYCVLYYSNRWVFGSGTKLTVLGGGGDKTHTCPPCPAPELLGGPSVFLFPP |
| | | | KPKDTLMISRTPEVTCVVVDVSHEDPEVKFNWYVDGVEVHNAKTKPCEEQYGSTYRCV |
| | | | SVLTVLHQDWLNGKEYKCKVSNKALPAPIEKTISKAKGQPREPQVYTLPPSREEMTKN |
| | | | QVSLTCLVKGFYPSDIAVEWESNGQPENNYKTTPPVLDSDGSFFLYSKLTVDKSRWQQ |
| | | | GNVFSCSVMHEALHNHYTQKSLSLSPGKGGGGSGGGGSGGGGSGGGGSGGGGSGGGGS |
| | | | DKTHTCPPCPAPELLGGPSVFLFPPKPKDTLMISRTPEVTCVVVDVSHEDPEVKENWY |
| | | | VDGVEVHNAKTKPCEEQYGSTYRCVSVLTVLHQDWLNGKEYKCKVSNKALPAPIEKTI |
| | | | SKAKGQPREPQVYTLPPSREEMTKNQVSLTCLVKGFYPSDIAVEWESNGQPENNYKTT |
| | | | PPVLDSDGSFFLYSKLTVDKSRWQQGNVFSCSVMHEALHNHYTQKSLSLSPGK |
| 2255 | CH3 R170R | artificial | EVQLLESGGGLVQPGGSLRLSCAASGFTFSSYWMHWVRQTPGKCLEWVSKIDPSDDYT |
| | CC x I2M x | | NYNQKVKGRFTISIDKSKNTLYLQMNSLRAEDTAVYYCARWDYSHEDVWGQGTTVTVS |
| | scFc-Full | | SGGGGSGGGGSGGGGSEIVMTQSPATLSVSPGERATLTCRASSSVSYMHWYQQKPGQA |
| | Sequence | | PRLLIYGTSNLVSGVPARFSGSGSGTEFTLTISSLQSEDFAVYYCQQWSSYPLTFGCG |
| | | | TKVEIKSGGGGSEVQLVESGGGLVQPGGSLKLSCAASGFTENKYAMNWVRQAPGKGME |
| | | | WVARIRSKYNNYATYYADAVKDRFTISRDDSKNTLYLQMNNLKTEDTAVYYCVRAGNE |
| | | | GTSYISYWAYWGQGTLVTVSSGGGGSGGGGSGGGGSQTVVTQEPSLTVSPGGTVTITC |
| | | | GSSTGAVTSGNYPNWVQKKPGQAPRGLIGGTKFLAPGTPARFSGSLSGGKAALTLSGV |
| | | | QPEDEAEYYCVLWYSNRWVFGSGTKLTVLGGGGDKTHTCPPCPAPELLGGPSVFLFPP |
| | | | KPKDTLMISRTPEVTCVVVDVSHEDPEVKFNWYVDGVEVHNAKTKPCEEQYGSTYRCV |
| | | | SVLTVLHQDWLNGKEYKCKVSNKALPAPIEKTISKAKGQPREPQVYTLPPSREEMTKN |
| | | | QVSLTCLVKGFYPSDIAVEWESNGQPENNYKTTPPVLDSDGSFFLYSKLTVDKSRWQQ |
| | | | GNVFSCSVMHEALHNHYTQKSLSLSPGKGGGGSGGGGSGGGGSGGGGSGGGGSGGGGS |
| | | | DKTHTCPPCPAPELLGGPSVFLFPPKPKDTLMISRTPEVTCVVVDVSHEDPEVKENWY |
| | | | VDGVEVHNAKTKPCEEQYGSTYRCVSVLTVLHQDWLNGKEYKCKVSNKALPAPIEKTI |
| | | | SKAKGQPREPQVYTLPPSREEMTKNQVSLTCLVKGFYPSDIAVEWESNGQPENNYKTT |
| | | | PPVLDSDGSFFLYSKLTVDKSRWQQGNVFSCSVMHEALHNHYTQKSLSLSPGK |
| 2256 | CH3 R170R | artificial | EVQLLESGGGLVQPGGSLRLSCAASGFTFSSYWMHWVRQTPGKCLEWVSKIDPSDDYT |
| | CC x I2M2 x | | NYNQKVKGRFTISIDKSKNTLYLQMNSLRAEDTAVYYCARWDYSHFDVWGQGTTVTVS |
| | scFc-Full | | SGGGGSGGGGSGGGGSEIVMTQSPATLSVSPGERATLTCRASSSVSYMHWYQQKPGQA |
| | Sequence | | PRLLIYGTSNLVSGVPARFSGSGSGTEFTLTISSLQSEDFAVYYCQQWSSYPLTFGCG |
| | | | TKVEIKSGGGGSEVQLVESGGGLVQPGGSLKLSCAASGFTFNKYAINWVREAPGKGLE |
| | | | WVARIRSKYNNYATYYADAVKDRFTISRDDSKNTAYLQMNNLKTEDTAVYYCVRNANF |
| | | | GTSYISYFAYWGQGTLVTVSSGGGGSGGGGSGGGGSQTVVTQEPSLTVSPGGTVTLTC |
| | | | GSSTGAVTSGNYPNWVQKKPGQAPRGLIGGTKFLAPGTPARFSGSLLGGKAALTLSGV |
| | | | QPEDEAEYYCVLWYSNRWVFGSGTKLTVLGGGGDKTHTCPPCPAPELLGGPSVFLFPP |
| | | | KPKDTLMISRTPEVTCVVVDVSHEDPEVKFNWYVDGVEVHNAKTKPCEEQYGSTYRCV |
| | | | SVLTVLHQDWLNGKEYKCKVSNKALPAPIEKTISKAKGQPREPQVYTLPPSREEMTKN |
| | | | QVSLTCLVKGFYPSDIAVEWESNGQPENNYKTTPPVLDSDGSFFLYSKLTVDKSRWQQ |
| | | | GNVFSCSVMHEALHNHYTQKSLSLSPGKGGGGSGGGGSGGGGSGGGGSGGGGSGGGGS |
| | | | DKTHTCPPCPAPELLGGPSVFLFPPKPKDTLMISRTPEVTCVVVDVSHEDPEVKENWY |
| | | | VDGVEVHNAKTKPCEEQYGSTYRCVSVLTVLHQDWLNGKEYKCKVSNKALPAPIEKTI |
| | | | SKAKGQPREPQVYTLPPSREEMTKNQVSLTCLVKGFYPSDIAVEWESNGQPENNYKTT |
| | | | PPVLDSDGSFFLYSKLTVDKSRWQQGNVFSCSVMHEALHNHYTQKSLSLSPGK |
| 2257 | CL1 7-D7 CC | artificial | NYYMH |
| | -HCDR1 | | |
| 2258 | CL1 7-D7 CC | artificial | WINPTSGGANYAQKFQG |
| | -HCDR2 | | |
| 2259 | CL1 7-D7 CC | artificial | ESHAIQEGIWFDY |
| | -HCDR3 | | |
| 2260 | CL1 7-D7 CC | artificial | RASQSISNYLN |
| | -LCDR1 | | |
| 2261 | CL1 7-D7 CC | artificial | DASSLQS |
| | -LCDR2 | | |
| 2262 | CL1 7-D7 CC | artificial | QQSYSFPLT |
| | -LCDR3 | | |
| 2263 | CL1 7-D7 CC | artificial | QVQLVQSGAEVKKPGASVKVSCKASGYTFTNYYMHWVRQAPGQCLEWMGWINPTSGGA |
| | -VH | | NYAQKFQGRVTMTRDTSISTAYMELSRLRSDDTAVYFCARESHAIQEGIWFDYWGQGT |
| | | | LVTVSS |
| 2264 | CL1 7-D7 CC | artificial | DIQMTQSPSSLSASVGDRVTISCRASQSISNYLNWYQQKPGKAPKLLIYDASSLQSGV |
| | -VL | | PSRFSGSGSGTDFTLTISSLQPEDFATYYCQQSYSFPLTFGCGTKVEIK |
| 2265 | CL1 7-D7 CC | artificial | EIQMTQSPSSLSASVGDRVTISCRASQSISNYLNWYQQKPGKAPKLLIYDASSLQSGV |
| | EI GQ-VL | | PSRFSGSGSGTDFTLTISSLQPEDFATYYCQQSYSFPLTFGCGTKVEIK |
| 2266 | CL1 7-D7 CC | artificial | QVQLVQSGAEVKKPGASVKVSCKASGYTFTNYYMHWVRQAPGQCLEWMGWINPTSGGA |
| | x I2Cx scFc | | NYAQKFQGRVTMTRDTSISTAYMELSRLRSDDTAVYFCARESHAIQEGIWFDYWGQGT |
| | -Full | | LVTVSSGGGGSGGGGSGGGGSDIQMTQSPSSLSASVGDRVTISCRASQSISNYLNWYQ |
| | Sequence | | QKPGKAPKLLIYDASSLQSGVPSRFSGSGSGTDFTLTISSLQPEDFATYYCQQSYSFP |
| | | | LTFGCGTKVEIKSGGGGSEVQLVESGGGLVQPGGSLKLSCAASGFTENKYAMNWVRQA |
| | | | PGKGLEWVARIRSKYNNYATYYADSVKDRFTISRDDSKNTAYLQMNNLKTEDTAVYYC |
| | | | VRHGNFGNSYISYWAYWGQGTLVTVSSGGGGSGGGGSGGGGSQTVVTQEPSLTVSPGG |
| | | | TVTLTCGSSTGAVTSGNYPNWVQQKPGQAPRGLIGGTKFLAPGTPARFSGSLLGGKAA |
| | | | LTLSGVQPEDEAEYYCVLWYSNRWVFGGGTKLTVLGGGGDKTHTCPPCPAPELLGGPS |
| | | | VFLFPPKPKDTLMISRTPEVTCVVVDVSHEDPEVKFNWYVDGVEVHNAKTKPCEEQYG |
| | | | STYRCVSVLTVLHQDWLNGKEYKCKVSNKALPAPIEKTISKAKGQPREPQVYTLPPSR |
| | | | EEMTKNQVSLTCLVKGFYPSDIAVEWESNGQPENNYKTTPPVLDSDGSFFLYSKLTVD |
| | | | KSRWQQGNVFSCSVMHEALHNHYTQKSLSLSPGKGGGGSGGGGSGGGGSGGGGSGGGG |
| | | | SGGGGSDKTHTCPPCPAPELLGGPSVFLFPPKPKDTLMISRTPEVTCVVVDVSHEDPE |
| | | | VKFNWYVDGVEVHNAKTKPCEEQYGSTYRCVSVLTVLHQDWLNGKEYKCKVSNKALPA |
| | | | PIEKTISKAKGQPREPQVYTLPPSREEMTKNQVSLTCLVKGFYPSDIAVEWESNGQPE |
| | | | NNYKTTPPVLDSDGSFFLYSKLTVDKSRWQQGNVFSCSVMHEALHNHYTQKSLSLSPG |
| | | | K |
| 2267 | CL1 7-D7 CC | artificial | QVQLVQSGAEVKKPGASVKVSCKASGYTFTNYYMHWVRQAPGQCLEWMGWINPTSGGA |
| | x I2Ex scFc | | NYAQKFQGRVTMTRDTSISTAYMELSRLRSDDTAVYFCARESHAIQEGIWFDYWGQGT |
| | -Full | | LVTVSSGGGGSGGGGSGGGGSDIQMTQSPSSLSASVGDRVTISCRASQSISNYLNWYQ |
| | Sequence | | QKPGKAPKLLIYDASSLQSGVPSRFSGSGSGTDFTLTISSLQPEDFATYYCQQSYSFP |
| | | | LTFGCGTKVEIKSGGGGSEVQLVESGGGLVQPGGSLKLSCAASGFTFNKYAINWVRQA |
| | | | PGKGLEWVARIRSKYNNYATYYADAVKDRFTISRDDSKNTVYLQMNNLKTEDTAVYYC |
| | | | ARAGNFGSSYISYWAYWGQGTLVTVSSGGGGSGGGGSGGGGSQTVVTQEPSLTVSPGG |
| | | | TVTITCGSSTGAVTSGNYPNWVQKKPGQAPRGLIGGTKFLAPGTPARFSGSLSGGKAA |
| | | | LTLSGVQPEDEAEYYCVLWYSNRWVFGSGTKLTVLGGGGDKTHTCPPCPAPELLGGPS |
| | | | VFLFPPKPKDTLMISRTPEVTCVVVDVSHEDPEVKFNWYVDGVEVHNAKTKPCEEQYG |
| | | | STYRCVSVLTVLHQDWLNGKEYKCKVSNKALPAPIEKTISKAKGQPREPQVYTLPPSR |
| | | | EEMTKNQVSLTCLVKGFYPSDIAVEWESNGQPENNYKTTPPVLDSDGSFFLYSKLTVD |
| | | | KSRWQQGNVFSCSVMHEALHNHYTQKSLSLSPGKGGGGSGGGGSGGGGSGGGGSGGGG |
| | | | SGGGGSDKTHTCPPCPAPELLGGPSVFLFPPKPKDTLMISRTPEVTCVVVDVSHEDPE |
| | | | VKFNWYVDGVEVHNAKTKPCEEQYGSTYRCVSVLTVLHQDWLNGKEYKCKVSNKALPA |
| | | | PIEKTISKAKGQPREPQVYTLPPSREEMTKNQVSLTCLVKGFYPSDIAVEWESNGQPE |
| | | | NNYKTTPPVLDSDGSFFLYSKLTVDKSRWQQGNVFSCSVMHEALHNHYTQKSLSLSPG |
| | | | K |
| 2268 | CL1 7-D7 CC | artificial | QVQLVQSGAEVKKPGASVKVSCKASGYTFTNYYMHWVRQAPGQCLEWMGWINPTSGGA |
| | x 12Kx scFc | | NYAQKFQGRVTMTRDTSISTAYMELSRLRSDDTAVYFCARESHAIQEGIWFDYWGQGT |
| | -Full | | LVTVSSGGGGSGGGGSGGGGSDIQMTQSPSSLSASVGDRVTISCRASQSISNYLNWYQ |
| | Sequence | | QKPGKAPKLLIYDASSLQSGVPSRFSGSGSGTDFTLTISSLQPEDFATYYCQQSYSFP |
| | | | LTFGCGTKVEIKSGGGGSEVQLVESGGGLVQPGGSLKLSCAASGFTFNKYAMNWVRQA |
| | | | PGKGLEWVARIRSKYNNYATYYAEAVKGRFTISRDDSKNTVYLQMNNLKTEDTAVYYC |
| | | | VRNENIGTSYISYWAYWGQGTLVTVSSGGGGSGGGGSGGGGSQTVVTQEPSLTVSPGG |
| | | | TVTITCGSSTGAVTSGNYPNWVQQKPGQAPRGLIGGTKFLAPGTPARFSGSLSGGKAA |
| | | | LTLSGVQPEDEAEYYCVLWYSNRWVFGSGTKLTVLGGGGDKTHTCPPCPAPELLGGPS |
| | | | VFLFPPKPKDTLMISRTPEVTCVVVDVSHEDPEVKFNWYVDGVEVHNAKTKPCEEQYG |
| | | | STYRCVSVLTVLHQDWLNGKEYKCKVSNKALPAPIEKTISKAKGQPREPQVYTLPPSR |
| | | | EEMTKNQVSLTCLVKGFYPSDIAVEWESNGQPENNYKTTPPVLDSDGSFFLYSKLTVD |
| | | | KSRWQQGNVFSCSVMHEALHNHYTQKSLSLSPGKGGGGSGGGGSGGGGSGGGGSGGGG |
| | | | SGGGGSDKTHTCPPCPAPELLGGPSVFLFPPKPKDTLMISRTPEVTCVVVDVSHEDPE |
| | | | VKFNWYVDGVEVHNAKTKPCEEQYGSTYRCVSVLTVLHQDWLNGKEYKCKVSNKALPA |
| | | | PIEKTISKAKGQPREPQVYTLPPSREEMTKNQVSLTCLVKGFYPSDIAVEWESNGQPE |
| | | | NNYKTTPPVLDSDGSFFLYSKLTVDKSRWQQGNVFSCSVMHEALHNHYTQKSLSLSPG |
| | | | K |
| 2269 | CL1 7-D7 CC | artificial | QVQLVQSGAEVKKPGASVKVSCKASGYTFTNYYMHWVRQAPGQCLEWMGWINPTSGGA |
| | x I2Lx scFc | | NYAQKFQGRVTMTRDTSISTAYMELSRLRSDDTAVYFCARESHAIQEGIWFDYWGQGT |
| | -Full | | LVTVSSGGGGSGGGGSGGGGSDIQMTQSPSSLSASVGDRVTISCRASQSISNYLNWYQ |
| | Sequence | | QKPGKAPKLLIYDASSLQSGVPSRFSGSGSGTDFTLTISSLQPEDFATYYCQQSYSFP |
| | | | LTFGCGTKVEIKSGGGGSEVQLVESGGGLVQPGGSLKLSCAASGFTFNKYAMNWVRQA |
| | | | PGKGMEWVARIRSKYNNYATYYADAVKDRFTISRDDSKNTLYLQMNNLKTEDTAVYYC |
| | | | VRAGNFGSSYISYFAYWGQGTLVTVSSGGGGSGGGGSGGGGSQTVVTQEPSLTVSPGG |
| | | | TVTITCGSSTGAVTSGNYPNWIQKKPGQAPRGLIGGTKFLAPGTPARFSGSLEGGKAA |
| | | | LTLSGVQPEDEAEYYCVLYYSNRWVFGSGTKLTVLGGGGDKTHTCPPCPAPELLGGPS |
| | | | VFLFPPKPKDTLMISRTPEVTCVVVDVSHEDPEVKENWYVDGVEVHNAKTKPCEEQYG |
| | | | STYRCVSVLTVLHQDWLNGKEYKCKVSNKALPAPIEKTISKAKGQPREPQVYTLPPSR |
| | | | EEMTKNQVSLTCLVKGFYPSDIAVEWESNGQPENNYKTTPPVLDSDGSFFLYSKLTVD |
| | | | KSRWQQGNVFSCSVMHEALHNHYTQKSLSLSPGKGGGGSGGGGSGGGGSGGGGSGGGG |
| | | | SGGGGSDKTHTCPPCPAPELLGGPSVFLFPPKPKDTLMISRTPEVTCVVVDVSHEDPE |
| | | | VKFNWYVDGVEVHNAKTKPCEEQYGSTYRCVSVLTVLHQDWLNGKEYKCKVSNKALPA |
| | | | PIEKTISKAKGQPREPQVYTLPPSREEMTKNQVSLTCLVKGFYPSDIAVEWESNGQPE |
| | | | NNYKTTPPVLDSDGSFFLYSKLTVDKSRWQQGNVFSCSVMHEALHNHYTQKSLSLSPG |
| | | | K |
| 2270 | CL1 7-D7 CC | artificial | QVQLVQSGAEVKKPGASVKVSCKASGYTFTNYYMHWVRQAPGQCLEWMGWINPTSGGA |
| | x I2M2x | | NYAQKFQGRVTMTRDTSISTAYMELSRLRSDDTAVYFCARESHAIQEGIWFDYWGQGT |
| | ScFc-Full | | LVTVSSGGGGSGGGGSGGGGSDIQMTQSPSSLSASVGDRVTISCRASQSISNYLNWYQ |
| | Sequence | | QKPGKAPKLLIYDASSLQSGVPSRFSGSGSGTDFTLTISSLQPEDFATYYCQQSYSFP |
| | | | LTFGCGTKVEIKSGGGGSEVQLVESGGGLVQPGGSLKLSCAASGFTENKYAINWVREA |
| | | | PGKGLEWVARIRSKYNNYATYYADAVKDRFTISRDDSKNTAYLQMNNLKTEDTAVYYC |
| | | | VRNANFGTSYISYFAYWGQGTLVTVSSGGGGSGGGGSGGGGSQTVVTQEPSLTVSPGG |
| | | | TVTLTCGSSTGAVTSGNYPNWVQKKPGQAPRGLIGGTKFLAPGTPARFSGSLLGGKAA |
| | | | LTLSGVQPEDEAEYYCVLWYSNRWVFGSGTKLTVLGGGGDKTHTCPPCPAPELLGGPS |
| | | | VFLFPPKPKDTLMISRTPEVTCVVVDVSHEDPEVKENWYVDGVEVHNAKTKPCEEQYG |
| | | | STYRCVSVLTVLHQDWLNGKEYKCKVSNKALPAPIEKTISKAKGQPREPQVYTLPPSR |
| | | | EEMTKNQVSLTCLVKGFYPSDIAVEWESNGQPENNYKTTPPVLDSDGSFFLYSKLTVD |
| | | | KSRWQQGNVFSCSVMHEALHNHYTQKSLSLSPGKGGGGSGGGGSGGGGSGGGGSGGGG |
| | | | SGGGGSDKTHTCPPCPAPELLGGPSVFLFPPKPKDTLMISRTPEVTCVVVDVSHEDPE |
| | | | VKFNWYVDGVEVHNAKTKPCEEQYGSTYRCVSVLTVLHQDWLNGKEYKCKVSNKALPA |
| | | | PIEKTISKAKGQPREPQVYTLPPSREEMTKNQVSLTCLVKGFYPSDIAVEWESNGQPE |
| | | | NNYKTTPPVLDSDGSFFLYSKLTVDKSRWQQGNVFSCSVMHEALHNHYTQKSLSLSPG |
| | | | K |
| 2271 | CL1 7-D7 CC | artificial | QVQLVQSGAEVKKPGASVKVSCKASGYTFTNYYMHWVRQAPGQCLEWMGWINPTSGGA |
| | x I2Mx scFc | | NYAQKFQGRVTMTRDTSISTAYMELSRLRSDDTAVYFCARESHAIQEGIWFDYWGQGT |
| | -Full | | LVTVSSGGGGSGGGGSGGGGSDIQMTQSPSSLSASVGDRVTISCRASQSISNYLNWYQ |
| | Sequence | | QKPGKAPKLLIYDASSLQSGVPSRFSGSGSGTDFTLTISSLQPEDFATYYCQQSYSFP |
| | | | LTFGCGTKVEIKSGGGGSEVQLVESGGGLVQPGGSLKLSCAASGFTFNKYAMNWVRQA |
| | | | PGKGMEWVARIRSKYNNYATYYADAVKDRFTISRDDSKNTLYLQMNNLKTEDTAVYYC |
| | | | VRAGNFGTSYISYWAYWGQGTLVTVSSGGGGSGGGGSGGGGSQTVVTQEPSLTVSPGG |
| | | | TVTITCGSSTGAVTSGNYPNWVQKKPGQAPRGLIGGTKFLAPGTPARFSGSLSGGKAA |
| | | | LTLSGVQPEDEAEYYCVLWYSNRWVFGSGTKLTVLGGGGDKTHTCPPCPAPELLGGPS |
| | | | VELFPPKPKDTLMISRTPEVTCVVVDVSHEDPEVKFNWYVDGVEVHNAKTKPCEEQYG |
| | | | STYRCVSVLTVLHQDWLNGKEYKCKVSNKALPAPIEKTISKAKGQPREPQVYTLPPSR |
| | | | EEMTKNQVSLTCLVKGFYPSDIAVEWESNGQPENNYKTTPPVLDSDGSFFLYSKLTVD |
| | | | KSRWQQGNVFSCSVMHEALHNHYTQKSLSLSPGKGGGGSGGGGSGGGGSGGGGSGGGG |
| | | | SGGGGSDKTHTCPPCPAPELLGGPSVFLFPPKPKDTLMISRTPEVTCVVVDVSHEDPE |
| | | | VKFNWYVDGVEVHNAKTKPCEEQYGSTYRCVSVLTVLHQDWLNGKEYKCKVSNKALPA |
| | | | PIEKTISKAKGQPREPQVYTLPPSREEMTKNQVSLTCLVKGFYPSDIAVEWESNGQPE |
| | | | NNYKTTPPVLDSDGSFFLYSKLTVDKSRWQQGNVFSCSVMHEALHNHYTQKSLSLSPG |
| | | | K |
| 2272 | CS | artificial | SSWMN |
| | PDL241.12.LH | | |
| | CC- | | |
| | HCDR1 | | |
| 2273 | CS | artificial | RIYPGDADAKYNAKFKG |
| | PDL241.12.LH | | |
| | CC- | | |
| | HCDR2 | | |
| 2274 | CS | artificial | STMIATGAMDY |
| | PDL241.12.LH | | |
| | CC- | | |
| | HCDR3 | | |
| 2275 | CS | artificial | KASQDVSTAVA |
| | PDL241.12.LH | | |
| | CC- | | |
| | LCDR1 | | |
| 2276 | CS | artificial | SASYRYT |
| | PDL241.12.LH | | |
| | CC- | | |
| | LCDR2 | | |
| 2277 | CS | artificial | QQHYSTPPYT |
| | PDL241.12.LH | | |
| | CC- | | |
| | LCDR3 | | |
| 2278 | CS | artificial | QVQLVQSGAEVKKPGASVKVSCKASGYAFSSSWMNWVRQAPGQCLEWIGRIYPGDADA |
| | PDL241.12.LH | | KYNAKFKGKATLTADKSTSTAYMELSSLRSEDTAVYYCARSTMIATGAMDYWGQGTLV |
| | CC-VH | | TVSS |
| 2279 | CS | artificial | DIQMTQSPSSLSASVGDRVTITCKASQDVSTAVAWYQQKPGKAPKLLIYSASYRYTGV |
| | PDL241.12.LH | | PDRFTGSGSGTDFTLTISSLQPEDFATYYCQQHYSTPPYTFGCGTKVEIKR |
| | CC-VL | | |
| 2280 | CS | artificial | DIQMTQSPSSLSASVGDRVTITCKASQDVSTAVAWYQQKPGKAPKLLIYSASYRYTGV |
| | PDL241.12_LH | | PDRFTGSGSGTDFTLTISSLQPEDFATYYCQQHYSTPPYTFGCGTKVEIKRGGGGSGG |
| | CC x I2C | | GGSGGGGSQVQLVQSGAEVKKPGASVKVSCKASGYAFSSSWMNWVRQAPGQCLEWIGR |
| | x scFc- | | IYPGDADAKYNAKFKGKATLTADKSTSTAYMELSSLRSEDTAVYYCARSTMIATGAMD |
| | Full | | YWGQGTLVTVSSSGGGGSEVQLVESGGGLVQPGGSLKLSCAASGFTENKYAMNWVRQA |
| | Sequence | | PGKGLEWVARIRSKYNNYATYYADSVKDRFTISRDDSKNTAYLQMNNLKTEDTAVYYC |
| | | | VRHGNFGNSYISYWAYWGQGTLVTVSSGGGGSGGGGSGGGGSQTVVTQEPSLTVSPGG |
| | | | TVTLTCGSSTGAVTSGNYPNWVQQKPGQAPRGLIGGTKFLAPGTPARFSGSLLGGKAA |
| | | | LTLSGVQPEDEAEYYCVLWYSNRWVFGGGTKLTVLGGGGDKTHTCPPCPAPELLGGPS |
| | | | VFLFPPKPKDTLMISRTPEVTCVVVDVSHEDPEVKENWYVDGVEVHNAKTKPCEEQYG |
| | | | STYRCVSVLTVLHQDWLNGKEYKCKVSNKALPAPIEKTISKAKGQPREPQVYTLPPSR |
| | | | EEMTKNQVSLTCLVKGFYPSDIAVEWESNGQPENNYKTTPPVLDSDGSFFLYSKLTVD |
| | | | KSRWQQGNVFSCSVMHEALHNHYTQKSLSLSPGKGGGGSGGGGSGGGGSGGGGSGGGG |
| | | | SGGGGSDKTHTCPPCPAPELLGGPSVFLFPPKPKDTLMISRTPEVTCVVVDVSHEDPE |
| | | | VKFNWYVDGVEVHNAKTKPCEEQYGSTYRCVSVLTVLHQDWLNGKEYKCKVSNKALPA |
| | | | PIEKTISKAKGQPREPQVYTLPPSREEMTKNQVSLTCLVKGFYPSDIAVEWESNGQPE |
| | | | NNYKTTPPVLDSDGSFFLYSKLTVDKSRWQQGNVFSCSVMHEALHNHYTQKSLSLSPG |
| | | | K |
| 2281 | CS | artificial | DIQMTQSPSSLSASVGDRVTITCKASQDVSTAVAWYQQKPGKAPKLLIYSASYRYTGV |
| | PDL241.12 LH | | PDRFTGSGSGTDFTLTISSLQPEDFATYYCQQHYSTPPYTFGCGTKVEIKRGGGGSGG |
| | CC x I2E | | GGSGGGGSQVQLVQSGAEVKKPGASVKVSCKASGYAFSSSWMNWVRQAPGQCLEWIGR |
| | x scFc- | | IYPGDADAKYNAKFKGKATLTADKSTSTAYMELSSLRSEDTAVYYCARSTMIATGAMD |
| | Full | | YWGQGTLVTVSSSGGGGSEVQLVESGGGLVQPGGSLKLSCAASGFTFNKYAINWVRQA |
| | Sequence | | PGKGLEWVARIRSKYNNYATYYADAVKDRFTISRDDSKNTVYLQMNNLKTEDTAVYYC |
| | | | ARAGNFGSSYISYWAYWGQGTLVTVSSGGGGSGGGGSGGGGSQTVVTQEPSLTVSPGG |
| | | | TVTITCGSSTGAVTSGNYPNWVQKKPGQAPRGLIGGTKFLAPGTPARFSGSLSGGKAA |
| | | | LTLSGVQPEDEAEYYCVLWYSNRWVFGSGTKLTVLGGGGDKTHTCPPCPAPELLGGPS |
| | | | VFLFPPKPKDTLMISRTPEVTCVVVDVSHEDPEVKFNWYVDGVEVHNAKTKPCEEQYG |
| | | | STYRCVSVLTVLHQDWLNGKEYKCKVSNKALPAPIEKTISKAKGQPREPQVYTLPPSR |
| | | | EEMTKNQVSLTCLVKGFYPSDIAVEWESNGQPENNYKTTPPVLDSDGSFFLYSKLTVD |
| | | | KSRWQQGNVFSCSVMHEALHNHYTQKSLSLSPGKGGGGSGGGGSGGGGSGGGGSGGGG |
| | | | SGGGGSDKTHTCPPCPAPELLGGPSVFLFPPKPKDTLMISRTPEVTCVVVDVSHEDPE |
| | | | VKFNWYVDGVEVHNAKTKPCEEQYGSTYRCVSVLTVLHQDWLNGKEYKCKVSNKALPA |
| | | | PIEKTISKAKGQPREPQVYTLPPSREEMTKNQVSLTCLVKGFYPSDIAVEWESNGQPE |
| | | | NNYKTTPPVLDSDGSFFLYSKLTVDKSRWQQGNVFSCSVMHEALHNHYTQKSLSLSPG |
| | | | K |
| 2282 | CS | artificial | DIQMTQSPSSLSASVGDRVTITCKASQDVSTAVAWYQQKPGKAPKLLIYSASYRYTGV |
| | PDL241.12 LH | | PDRFTGSGSGTDFTLTISSLQPEDFATYYCQQHYSTPPYTFGCGTKVEIKRGGGGSGG |
| | CC x I2K | | GGSGGGGSQVQLVQSGAEVKKPGASVKVSCKASGYAFSSSWMNWVRQAPGQCLEWIGR |
| | x scFc- | | IYPGDADAKYNAKFKGKATLTADKSTSTAYMELSSLRSEDTAVYYCARSTMIATGAMD |
| | Full | | YWGQGTLVTVSSSGGGGSEVQLVESGGGLVQPGGSLKLSCAASGFTENKYAMNWVRQA |
| | Sequence | | PGKGLEWVARIRSKYNNYATYYAEAVKGRFTISRDDSKNTVYLQMNNLKTEDTAVYYC |
| | | | VRNENIGTSYISYWAYWGQGTLVTVSSGGGGSGGGGSGGGGSQTVVTQEPSLTVSPGG |
| | | | TVTITCGSSTGAVTSGNYPNWVQQKPGQAPRGLIGGTKFLAPGTPARFSGSLSGGKAA |
| | | | LTLSGVQPEDEAEYYCVLWYSNRWVFGSGTKLTVLGGGGDKTHTCPPCPAPELLGGPS |
| | | | VFLFPPKPKDTLMISRTPEVTCVVVDVSHEDPEVKENWYVDGVEVHNAKTKPCEEQYG |
| | | | STYRCVSVLTVLHQDWLNGKEYKCKVSNKALPAPIEKTISKAKGQPREPQVYTLPPSR |
| | | | EEMTKNQVSLTCLVKGFYPSDIAVEWESNGQPENNYKTTPPVLDSDGSFFLYSKLTVD |
| | | | KSRWQQGNVFSCSVMHEALHNHYTQKSLSLSPGKGGGGSGGGGSGGGGSGGGGSGGGG |
| | | | SGGGGSDKTHTCPPCPAPELLGGPSVFLFPPKPKDTLMISRTPEVTCVVVDVSHEDPE |
| | | | VKFNWYVDGVEVHNAKTKPCEEQYGSTYRCVSVLTVLHQDWLNGKEYKCKVSNKALPA |
| | | | PIEKTISKAKGQPREPQVYTLPPSREEMTKNQVSLTCLVKGFYPSDIAVEWESNGQPE |
| | | | NNYKTTPPVLDSDGSFFLYSKLTVDKSRWQQGNVFSCSVMHEALHNHYTQKSLSLSPG |
| | | | K |
| | | | DIQMTQSPSSLSASVGDRVTITCKASQDVSTAVAWYQQKPGKAPKLLIYSASYRYTGV |
| 2283 | CS | artificial | PDRFTGSGSGTDFTLTISSLQPEDFATYYCQQHYSTPPYTFGCGTKVEIKRGGGGSGG |
| | PDL241.12 LH | | GGSGGGGSQVQLVQSGAEVKKPGASVKVSCKASGYAFSSSWMNWVRQAPGQCLEWIGR |
| | CC x I2L | | IYPGDADAKYNAKFKGKATLTADKSTSTAYMELSSLRSEDTAVYYCARSTMIATGAMD |
| | x scFc- | | YWGQGTLVTVSSSGGGGSEVQLVESGGGLVQPGGSLKLSCAASGFTFNKYAMNWVRQA |
| | Full | | PGKGMEWVARIRSKYNNYATYYADAVKDRFTISRDDSKNTLYLQMNNLKTEDTAVYYC |
| | Sequence | | VRAGNFGSSYISYFAYWGQGTLVTVSSGGGGSGGGGSGGGGSQTVVTQEPSLTVSPGG |
| | | | TVTITCGSSTGAVTSGNYPNWIQKKPGQAPRGLIGGTKFLAPGTPARFSGSLEGGKAA |
| | | | LTLSGVQPEDEAEYYCVLYYSNRWVFGSGTKLTVLGGGGDKTHTCPPCPAPELLGGPS |
| | | | VFLFPPKPKDTLMISRTPEVTCVVVDVSHEDPEVKENWYVDGVEVHNAKTKPCEEQYG |
| | | | STYRCVSVLTVLHQDWLNGKEYKCKVSNKALPAPIEKTISKAKGQPREPQVYTLPPSR |
| | | | EEMTKNQVSLTCLVKGFYPSDIAVEWESNGQPENNYKTTPPVLDSDGSFFLYSKLTVD |
| | | | KSRWQQGNVFSCSVMHEALHNHYTQKSLSLSPGKGGGGSGGGGSGGGGSGGGGSGGGG |
| | | | SGGGGSDKTHTCPPCPAPELLGGPSVFLFPPKPKDTLMISRTPEVTCVVVDVSHEDPE |
| | | | VKFNWYVDGVEVHNAKTKPCEEQYGSTYRCVSVLTVLHQDWLNGKEYKCKVSNKALPA |
| | | | PIEKTISKAKGQPREPQVYTLPPSREEMTKNQVSLTCLVKGFYPSDIAVEWESNGQPE |
| | | | NNYKTTPPVLDSDGSFFLYSKLTVDKSRWQQGNVFSCSVMHEALHNHYTQKSLSLSPG |
| | | | K |
| 2284 | CS | artificial | DIQMTQSPSSLSASVGDRVTITCKASQDVSTAVAWYQQKPGKAPKLLIYSASYRYTGV |
| | PDL241.12 LH | | PDRFTGSGSGTDFTLTISSLQPEDFATYYCQQHYSTPPYTFGCGTKVEIKRGGGGSGG |
| | CC x I2M | | GGSGGGGSQVQLVQSGAEVKKPGASVKVSCKASGYAFSSSWMNWVRQAPGQCLEWIGR |
| | x scFc- | | IYPGDADAKYNAKFKGKATLTADKSTSTAYMELSSLRSEDTAVYYCARSTMIATGAMD |
| | Full | | YWGQGTLVTVSSSGGGGSEVQLVESGGGLVQPGGSLKLSCAASGFTFNKYAMNWVRQA |
| | Sequence | | PGKGMEWVARIRSKYNNYATYYADAVKDRFTISRDDSKNTLYLQMNNLKTEDTAVYYC |
| | | | VRAGNFGTSYISYWAYWGQGTLVTVSSGGGGSGGGGSGGGGSQTVVTQEPSLTVSPGG |
| | | | TVTITCGSSTGAVTSGNYPNWVQKKPGQAPRGLIGGTKFLAPGTPARFSGSLSGGKAA |
| | | | LTLSGVQPEDEAEYYCVLWYSNRWVFGSGTKLTVLGGGGDKTHTCPPCPAPELLGGPS |
| | | | VFLFPPKPKDTLMISRTPEVTCVVVDVSHEDPEVKFNWYVDGVEVHNAKTKPCEEQYG |
| | | | STYRCVSVLTVLHQDWLNGKEYKCKVSNKALPAPIEKTISKAKGQPREPQVYTLPPSR |
| | | | EEMTKNQVSLTCLVKGFYPSDIAVEWESNGQPENNYKTTPPVLDSDGSFFLYSKLTVD |
| | | | KSRWQQGNVFSCSVMHEALHNHYTQKSLSLSPGKGGGGSGGGGSGGGGSGGGGSGGGG |
| | | | SGGGGSDKTHTCPPCPAPELLGGPSVFLFPPKPKDTLMISRTPEVTCVVVDVSHEDPE |
| | | | VKFNWYVDGVEVHNAKTKPCEEQYGSTYRCVSVLTVLHQDWLNGKEYKCKVSNKALPA |
| | | | PIEKTISKAKGQPREPQVYTLPPSREEMTKNQVSLTCLVKGFYPSDIAVEWESNGQPE |
| | | | NNYKTTPPVLDSDGSFFLYSKLTVDKSRWQQGNVFSCSVMHEALHNHYTQKSLSLSPG |
| | | | K |
| 2285 | CS | artificial | DIQMTQSPSSLSASVGDRVTITCKASQDVSTAVAWYQQKPGKAPKLLIYSASYRYTGV |
| | PDL241.12 LH | | PDRFTGSGSGTDFTLTISSLQPEDFATYYCQQHYSTPPYTFGCGTKVEIKRGGGGSGG |
| | CC x I2M2 | | GGSGGGGSQVQLVQSGAEVKKPGASVKVSCKASGYAFSSSWMNWVRQAPGQCLEWIGR |
| | x scFc- | | IYPGDADAKYNAKFKGKATLTADKSTSTAYMELSSLRSEDTAVYYCARSTMIATGAMD |
| | Full | | YWGQGTLVTVSSSGGGGSEVQLVESGGGLVQPGGSLKLSCAASGFTENKYAINWVREA |
| | Sequence | | PGKGLEWVARIRSKYNNYATYYADAVKDRFTISRDDSKNTAYLQMNNLKTEDTAVYYC |
| | | | VRNANFGTSYISYFAYWGQGTLVTVSSGGGGSGGGGSGGGGSQTVVTQEPSLTVSPGG |
| | | | TVTLTCGSSTGAVTSGNYPNWVQKKPGQAPRGLIGGTKFLAPGTPARFSGSLLGGKAA |
| | | | LTLSGVQPEDEAEYYCVLWYSNRWVFGSGTKLTVLGGGGDKTHTCPPCPAPELLGGPS |
| | | | VFLFPPKPKDTLMISRTPEVTCVVVDVSHEDPEVKENWYVDGVEVHNAKTKPCEEQYG |
| | | | STYRCVSVLTVLHQDWLNGKEYKCKVSNKALPAPIEKTISKAKGQPREPQVYTLPPSR |
| | | | EEMTKNQVSLTCLVKGFYPSDIAVEWESNGQPENNYKTTPPVLDSDGSFFLYSKLTVD |
| | | | KSRWQQGNVFSCSVMHEALHNHYTQKSLSLSPGKGGGGSGGGGSGGGGSGGGGSGGGG |
| | | | SGGGGSDKTHTCPPCPAPELLGGPSVFLFPPKPKDTLMISRTPEVTCVVVDVSHEDPE |
| | | | VKFNWYVDGVEVHNAKTKPCEEQYGSTYRCVSVLTVLHQDWLNGKEYKCKVSNKALPA |
| | | | PIEKTISKAKGQPREPQVYTLPPSREEMTKNQVSLTCLVKGFYPSDIAVEWESNGQPE |
| | | | NNYKTTPPVLDSDGSFFLYSKLTVDKSRWQQGNVFSCSVMHEALHNHYTQKSLSLSPG |
| | | | K |
| 2286 | CL6 3D4- | artificial | GYYMH |
| | 01.G2 LH- | | |
| | HCDR1 | | |
| 2287 | CL6 3D4- | artificial | WINPNSGETNYAQKFQG |
| | 01.G2 LH- | | |
| | HCDR2 | | |
| 2288 | CL6 3D4- | artificial | DALIVVAPVTRDYYYYGMDV |
| | 01.G2 LH- | | |
| | HCDR3 | | |
| 2289 | CL6 3D4- | artificial | RASQSVSSSYLA |
| | 01.G2 LH- | | |
| | LCDR1 | | |
| 2290 | CL6 3D4- | artificial | GASSRAT |
| | 01.G2 LH- | | |
| | LCDR2 | | |
| 2291 | CL6 3D4- | artificial | QQYGSSPLT |
| | 01.G2 LH- | | |
| | LCDR3 | | |
| 2292 | CL6 3D4- | artificial | QVQLVQSGAEVKKPGASVKVSCKASGYTFTGYYMHWVRQAPGQCLEWMGWINPNSGET |
| | 01.G2 LH- | | NYAQKFQGRVTMTRDTSISTAYMELSRLRSDDTAVYYCARDALIVVAPVTRDYYYYGM |
| | VH | | DVWGQGTTVTVSS |
| 2293 | CL6 3D4- | artificial | EIVLTQSPGTLSLSPGERATLSCRASQSVSSSYLAWYQQKPGQAPRLLIYGASSRATG |
| | 01.G2 LH- | | IPDRFSGSGSGTDFTLTISRLEPEDFAVYYCQQYGSSPLTFGCGTKLEIK |
| | VL | | |
| 2294 | CL6 3D4- | artificial | EIVLTQSPGTLSLSPGERATLSCRASQSVSSSYLAWYQQKPGQAPRLLIYGASSRATG |
| | 01.G2 LH x | | IPDRFSGSGSGTDFTLTISRLEPEDFAVYYCQQYGSSPLTFGCGTKLEIKGGGGSGGG |
| | I2Cx scFc- | | GSGGGGSQVQLVQSGAEVKKPGASVKVSCKASGYTFTGYYMHWVRQAPGQCLEWMGWI |
| | Full | | NPNSGETNYAQKFQGRVTMTRDTSISTAYMELSRLRSDDTAVYYCARDALIVVAPVTR |
| | Sequence | | DYYYYGMDVWGQGTTVTVSSSGGGGSEVQLVESGGGLVQPGGSLKLSCAASGFTENKY |
| | | | AMNWVRQAPGKGLEWVARIRSKYNNYATYYADSVKDRFTISRDDSKNTAYLQMNNLKT |
| | | | EDTAVYYCVRHGNFGNSYISYWAYWGQGTLVTVSSGGGGSGGGGSGGGGSQTVVTQEP |
| | | | SLTVSPGGTVTLTCGSSTGAVTSGNYPNWVQQKPGQAPRGLIGGTKFLAPGTPARFSG |
| | | | SLLGGKAALTLSGVQPEDEAEYYCVLWYSNRWVFGGGTKLTVLGGGGDKTHTCPPCPA |
| | | | PELLGGPSVFLFPPKPKDTLMISRTPEVTCVVVDVSHEDPEVKENWYVDGVEVHNAKT |
| | | | KPCEEQYGSTYRCVSVLTVLHQDWLNGKEYKCKVSNKALPAPIEKTISKAKGQPREPQ |
| | | | VYTLPPSREEMTKNQVSLTCLVKGFYPSDIAVEWESNGQPENNYKTTPPVLDSDGSFF |
| | | | LYSKLTVDKSRWQQGNVFSCSVMHEALHNHYTQKSLSLSPGKGGGGSGGGGSGGGGSG |
| | | | GGGSGGGGSGGGGSDKTHTCPPCPAPELLGGPSVFLFPPKPKDTLMISRTPEVTCVVV |
| | | | DVSHEDPEVKFNWYVDGVEVHNAKTKPCEEQYGSTYRCVSVLTVLHQDWLNGKEYKCK |
| | | | VSNKALPAPIEKTISKAKGQPREPQVYTLPPSREEMTKNQVSLTCLVKGFYPSDIAVE |
| | | | WESNGQPENNYKTTPPVLDSDGSFFLYSKLTVDKSRWQQGNVFSCSVMHEALHNHYTQ |
| | | | KSLSLSPGK |
| 2295 | CL6 3D4- | artificial | EIVLTQSPGTLSLSPGERATLSCRASQSVSSSYLAWYQQKPGQAPRLLIYGASSRATG |
| | 01.G2 LH x | | IPDRFSGSGSGTDFTLTISRLEPEDFAVYYCQQYGSSPLTFGCGTKLEIKGGGGSGGG |
| | 12Ex SCFc- | | GSGGGGSQVQLVQSGAEVKKPGASVKVSCKASGYTFTGYYMHWVRQAPGQCLEWMGWI |
| | Full | | NPNSGETNYAQKFQGRVTMTRDTSISTAYMELSRLRSDDTAVYYCARDALIVVAPVTR |
| | Sequence | | DYYYYGMDVWGQGTTVTVSSSGGGGSEVQLVESGGGLVQPGGSLKLSCAASGFTENKY |
| | | | AINWVRQAPGKGLEWVARIRSKYNNYATYYADAVKDRFTISRDDSKNTVYLQMNNLKT |
| | | | EDTAVYYCARAGNFGSSYISYWAYWGQGTLVTVSSGGGGSGGGGSGGGGSQTVVTQEP |
| | | | SLTVSPGGTVTITCGSSTGAVTSGNYPNWVQKKPGQAPRGLIGGTKFLAPGTPARFSG |
| | | | SLSGGKAALTLSGVQPEDEAEYYCVLWYSNRWVFGSGTKLTVLGGGGDKTHTCPPCPA |
| | | | PELLGGPSVFLFPPKPKDTLMISRTPEVTCVVVDVSHEDPEVKENWYVDGVEVHNAKT |
| | | | KPCEEQYGSTYRCVSVLTVLHQDWLNGKEYKCKVSNKALPAPIEKTISKAKGQPREPQ |
| | | | VYTLPPSREEMTKNQVSLTCLVKGFYPSDIAVEWESNGQPENNYKTTPPVLDSDGSFF |
| | | | LYSKLTVDKSRWQQGNVFSCSVMHEALHNHYTQKSLSLSPGKGGGGSGGGGSGGGGSG |
| | | | GGGSGGGGSGGGGSDKTHTCPPCPAPELLGGPSVFLFPPKPKDTLMISRTPEVTCVVV |
| | | | DVSHEDPEVKFNWYVDGVEVHNAKTKPCEEQYGSTYRCVSVLTVLHQDWLNGKEYKCK |
| | | | VSNKALPAPIEKTISKAKGQPREPQVYTLPPSREEMTKNQVSLTCLVKGFYPSDIAVE |
| | | | WESNGQPENNYKTTPPVLDSDGSFFLYSKLTVDKSRWQQGNVFSCSVMHEALHNHYTQ |
| | | | KSLSLSPGK |
| 2296 | CL6 3D4- | artificial | EIVLTQSPGTLSLSPGERATLSCRASQSVSSSYLAWYQQKPGQAPRLLIYGASSRATG |
| | 01.G2 LH x | | IPDRFSGSGSGTDFTLTISRLEPEDFAVYYCQQYGSSPLTFGCGTKLEIKGGGGSGGG |
| | I2Kx scFc- | | GSGGGGSQVQLVQSGAEVKKPGASVKVSCKASGYTFTGYYMHWVRQAPGQCLEWMGWI |
| | Full | | NPNSGETNYAQKFQGRVTMTRDTSISTAYMELSRLRSDDTAVYYCARDALIVVAPVTR |
| | Sequence | | DYYYYGMDVWGQGTTVTVSSSGGGGSEVQLVESGGGLVQPGGSLKLSCAASGFTENKY |
| | | | AMNWVRQAPGKGLEWVARIRSKYNNYATYYAEAVKGRFTISRDDSKNTVYLQMNNLKT |
| | | | EDTAVYYCVRNENIGTSYISYWAYWGQGTLVTVSSGGGGSGGGGSGGGGSQTVVTQEP |
| | | | SLTVSPGGTVTITCGSSTGAVTSGNYPNWVQQKPGQAPRGLIGGTKFLAPGTPARFSG |
| | | | SLSGGKAALTLSGVQPEDEAEYYCVLWYSNRWVFGSGTKLTVLGGGGDKTHTCPPCPA |
| | | | PELLGGPSVFLFPPKPKDTLMISRTPEVTCVVVDVSHEDPEVKENWYVDGVEVHNAKT |
| | | | KPCEEQYGSTYRCVSVLTVLHQDWLNGKEYKCKVSNKALPAPIEKTISKAKGQPREPQ |
| | | | VYTLPPSREEMTKNQVSLTCLVKGFYPSDIAVEWESNGQPENNYKTTPPVLDSDGSFF |
| | | | LYSKLTVDKSRWQQGNVFSCSVMHEALHNHYTQKSLSLSPGKGGGGSGGGGSGGGGSG |
| | | | GGGSGGGGSGGGGSDKTHTCPPCPAPELLGGPSVFLFPPKPKDTLMISRTPEVTCVVV |
| | | | DVSHEDPEVKFNWYVDGVEVHNAKTKPCEEQYGSTYRCVSVLTVLHQDWLNGKEYKCK |
| | | | VSNKALPAPIEKTISKAKGQPREPQVYTLPPSREEMTKNQVSLTCLVKGFYPSDIAVE |
| | | | WESNGQPENNYKTTPPVLDSDGSFFLYSKLTVDKSRWQQGNVFSCSVMHEALHNHYTQ |
| | | | KSLSLSPGK |
| 2297 | CL6 3D4- | artificial | EIVLTQSPGTLSLSPGERATLSCRASQSVSSSYLAWYQQKPGQAPRLLIYGASSRATG |
| | 01.G2 LH x | | IPDRESGSGSGTDFTLTISRLEPEDFAVYYCQQYGSSPLTFGCGTKLEIKGGGGSGGG |
| | I2Lx scFc- | | GSGGGGSQVQLVQSGAEVKKPGASVKVSCKASGYTFTGYYMHWVRQAPGQCLEWMGWI |
| | Full | | NPNSGETNYAQKFQGRVTMTRDTSISTAYMELSRLRSDDTAVYYCARDALIVVAPVTR |
| | Sequence | | DYYYYGMDVWGQGTTVTVSSSGGGGSEVQLVESGGGLVQPGGSLKLSCAASGFTENKY |
| | | | AMNWVRQAPGKGMEWVARIRSKYNNYATYYADAVKDRFTISRDDSKNTLYLQMNNLKT |
| | | | EDTAVYYCVRAGNFGSSYISYFAYWGQGTLVTVSSGGGGSGGGGSGGGGSQTVVTQEP |
| | | | SLTVSPGGTVTITCGSSTGAVTSGNYPNWIQKKPGQAPRGLIGGTKFLAPGTPARFSG |
| | | | SLEGGKAALTLSGVQPEDEAEYYCVLYYSNRWVFGSGTKLTVLGGGGDKTHTCPPCPA |
| | | | PELLGGPSVFLFPPKPKDTLMISRTPEVTCVVVDVSHEDPEVKENWYVDGVEVHNAKT |
| | | | KPCEEQYGSTYRCVSVLTVLHQDWLNGKEYKCKVSNKALPAPIEKTISKAKGQPREPQ |
| | | | VYTLPPSREEMTKNQVSLTCLVKGFYPSDIAVEWESNGQPENNYKTTPPVLDSDGSFF |
| | | | LYSKLTVDKSRWQQGNVFSCSVMHEALHNHYTQKSLSLSPGKGGGGSGGGGSGGGGSG |
| | | | GGGSGGGGSGGGGSDKTHTCPPCPAPELLGGPSVFLFPPKPKDTLMISRTPEVTCVVV |
| | | | DVSHEDPEVKFNWYVDGVEVHNAKTKPCEEQYGSTYRCVSVLTVLHQDWLNGKEYKCK |
| | | | VSNKALPAPIEKTISKAKGQPREPQVYTLPPSREEMTKNQVSLTCLVKGFYPSDIAVE |
| | | | WESNGQPENNYKTTPPVLDSDGSFFLYSKLTVDKSRWQQGNVFSCSVMHEALHNHYTQ |
| | | | KSLSLSPGK |
| 2298 | CL6 3D4- | artificial | EIVLTQSPGTLSLSPGERATLSCRASQSVSSSYLAWYQQKPGQAPRLLIYGASSRATG |
| | 01.G2 LH x | | IPDRFSGSGSGTDFTLTISRLEPEDFAVYYCQQYGSSPLTFGCGTKLEIKGGGGSGGG |
| | I2M2x scFc | | GSGGGGSQVQLVQSGAEVKKPGASVKVSCKASGYTFTGYYMHWVRQAPGQCLEWMGWI |
| | -Full | | NPNSGETNYAQKFQGRVTMTRDTSISTAYMELSRLRSDDTAVYYCARDALIVVAPVTR |
| | Sequence | | DYYYYGMDVWGQGTTVTVSSSGGGGSEVQLVESGGGLVQPGGSLKLSCAASGFTENKY |
| | | | AINWVREAPGKGLEWVARIRSKYNNYATYYADAVKDRFTISRDDSKNTAYLQMNNLKT |
| | | | EDTAVYYCVRNANFGTSYISYFAYWGQGTLVTVSSGGGGSGGGGSGGGGSQTVVTQEP |
| | | | SLTVSPGGTVTLTCGSSTGAVTSGNYPNWVQKKPGQAPRGLIGGTKFLAPGTPARFSG |
| | | | SLLGGKAALTLSGVQPEDEAEYYCVLWYSNRWVFGSGTKLTVLGGGGDKTHTCPPCPA |
| | | | PELLGGPSVFLFPPKPKDTLMISRTPEVTCVVVDVSHEDPEVKENWYVDGVEVHNAKT |
| | | | KPCEEQYGSTYRCVSVLTVLHQDWLNGKEYKCKVSNKALPAPIEKTISKAKGQPREPQ |
| | | | VYTLPPSREEMTKNQVSLTCLVKGFYPSDIAVEWESNGQPENNYKTTPPVLDSDGSFF |
| | | | LYSKLTVDKSRWQQGNVFSCSVMHEALHNHYTQKSLSLSPGKGGGGSGGGGSGGGGSG |
| | | | GGGSGGGGSGGGGSDKTHTCPPCPAPELLGGPSVFLFPPKPKDTLMISRTPEVTCVVV |
| | | | DVSHEDPEVKFNWYVDGVEVHNAKTKPCEEQYGSTYRCVSVLTVLHQDWLNGKEYKCK |
| | | | VSNKALPAPIEKTISKAKGQPREPQVYTLPPSREEMTKNQVSLTCLVKGFYPSDIAVE |
| | | | WESNGQPENNYKTTPPVLDSDGSFFLYSKLTVDKSRWQQGNVFSCSVMHEALHNHYTQ |
| | | | KSLSLSPGK |
| 2299 | CL6 3D4- | artificial | EIVLTQSPGTLSLSPGERATLSCRASQSVSSSYLAWYQQKPGQAPRLLIYGASSRATG |
| | 01.G2 LH x | | IPDRFSGSGSGTDFTLTISRLEPEDFAVYYCQQYGSSPLTFGCGTKLEIKGGGGSGGG |
| | I2Mx scFc- | | GSGGGGSQVQLVQSGAEVKKPGASVKVSCKASGYTFTGYYMHWVRQAPGQCLEWMGWI |
| | Full | | NPNSGETNYAQKFQGRVTMTRDTSISTAYMELSRLRSDDTAVYYCARDALIVVAPVTR |
| | Sequence | | DYYYYGMDVWGQGTTVTVSSSGGGGSEVQLVESGGGLVQPGGSLKLSCAASGFTENKY |
| | | | AMNWVRQAPGKGMEWVARIRSKYNNYATYYADAVKDRFTISRDDSKNTLYLQMNNLKT |
| | | | EDTAVYYCVRAGNFGTSYISYWAYWGQGTLVTVSSGGGGSGGGGSGGGGSQTVVTQEP |
| | | | SLTVSPGGTVTITCGSSTGAVTSGNYPNWVQKKPGQAPRGLIGGTKFLAPGTPARFSG |
| | | | SLSGGKAALTLSGVQPEDEAEYYCVLWYSNRWVFGSGTKLTVLGGGGDKTHTCPPCPA |
| | | | PELLGGPSVFLFPPKPKDTLMISRTPEVTCVVVDVSHEDPEVKENWYVDGVEVHNAKT |
| | | | KPCEEQYGSTYRCVSVLTVLHQDWLNGKEYKCKVSNKALPAPIEKTISKAKGQPREPQ |
| | | | VYTLPPSREEMTKNQVSLTCLVKGFYPSDIAVEWESNGQPENNYKTTPPVLDSDGSFF |
| | | | LYSKLTVDKSRWQQGNVFSCSVMHEALHNHYTQKSLSLSPGKGGGGSGGGGSGGGGSG |
| | | | GGGSGGGGSGGGGSDKTHTCPPCPAPELLGGPSVFLFPPKPKDTLMISRTPEVTCVVV |
| | | | DVSHEDPEVKFNWYVDGVEVHNAKTKPCEEQYGSTYRCVSVLTVLHQDWLNGKEYKCK |
| | | | VSNKALPAPIEKTISKAKGQPREPQVYTLPPSREEMTKNQVSLTCLVKGFYPSDIAVE |
| | | | WESNGQPENNYKTTPPVLDSDGSFFLYSKLTVDKSRWQQGNVFSCSVMHEALHNHYTQ |
| | | | KSLSLSPGK |
| 2300 | CL 10D8 CC | artificial | GYYMH |
| | -HCDR1 | | |
| 2301 | CL 10D8 CC | artificial | WINPNSGGTKYAQKFQG |
| | -HCDR2 | | |
| 2302 | CL 10D8 CC | artificial | DRITVAGTYYYYGMDV |
| | -HCDR3 | | |
| 2303 | CL 10D8 CC | artificial | RASQGVNNWLA |
| | -LCDR1 | | |
| 2304 | CL 10D8 CC | artificial | TASSLQS |
| | -LCDR2 | | |
| 2305 | CL 10D8 CC | artificial | QQANSFPIT |
| | -LCDR3 | | |
| 2306 | CL 10D8 CC | artificial | QVQLVQSGAEVKKPGASVKVSCKASGYTFTGYYMHWVRQAPGQCLEWMGWINPNSGGT |
| | -VH | | KYAQKFQGRVTMTRDTSISTAYMELSRLRSDDTAVYYCARDRITVAGTYYYYGMDVWG |
| | | | QGTTVTVSS |
| 2307 | CL 10D8 CC | artificial | DIQMTQSPSSVSASVGDRVTITCRASQGVNNWLAWYQQKPGKAPKLLIYTASSLQSGV |
| | -VL | | PSRFSGSGSGTDFTLTIRSLQPEDFATYYCQQANSFPITFGCGTRLEIK |
| 2308 | CL 10D8 CC | artificial | EIQMTQSPSSVSASVGDRVTITCRASQGVNNWLAWYQQKPGKAPKLLIYTASSLQSGV |
| | EI GQ-VL | | PSRFSGSGSGTDFTLTIRSLQPEDFATYYCQQANSFPITFGCGTRLEIK |
| 2309 | CL 10D8 CC | artificial | QVQLVQSGAEVKKPGASVKVSCKASGYTFTGYYMHWVRQAPGQCLEWMGWINPNSGGT |
| | x I2C x | | KYAQKFQGRVTMTRDTSISTAYMELSRLRSDDTAVYYCARDRITVAGTYYYYGMDVWG |
| | scFc-Full | | QGTTVTVSSGGGGSGGGGSGGGGSDIQMTQSPSSVSASVGDRVTITCRASQGVNNWLA |
| | Sequence | | WYQQKPGKAPKLLIYTASSLQSGVPSRFSGSGSGTDFTLTIRSLQPEDFATYYCQQAN |
| | | | SFPITFGCGTRLEIKSGGGGSEVQLVESGGGLVQPGGSLKLSCAASGFTENKYAMNWV |
| | | | RQAPGKGLEWVARIRSKYNNYATYYADSVKDRFTISRDDSKNTAYLQMNNLKTEDTAV |
| | | | YYCVRHGNFGNSYISYWAYWGQGTLVTVSSGGGGSGGGGSGGGGSQTVVTQEPSLTVS |
| | | | PGGTVTLTCGSSTGAVTSGNYPNWVQQKPGQAPRGLIGGTKFLAPGTPARFSGSLLGG |
| | | | KAALTLSGVQPEDEAEYYCVLWYSNRWVFGGGTKLTVLGGGGDKTHTCPPCPAPELLG |
| | | | GPSVFLFPPKPKDTLMISRTPEVTCVVVDVSHEDPEVKFNWYVDGVEVHNAKTKPCEE |
| | | | QYGSTYRCVSVLTVLHQDWLNGKEYKCKVSNKALPAPIEKTISKAKGQPREPQVYTLP |
| | | | PSREEMTKNQVSLTCLVKGFYPSDIAVEWESNGQPENNYKTTPPVLDSDGSFFLYSKL |
| | | | TVDKSRWQQGNVFSCSVMHEALHNHYTQKSLSLSPGKGGGGSGGGGSGGGGSGGGGSG |
| | | | GGGSGGGGSDKTHTCPPCPAPELLGGPSVFLFPPKPKDTLMISRTPEVTCVVVDVSHE |
| | | | DPEVKFNWYVDGVEVHNAKTKPCEEQYGSTYRCVSVLTVLHQDWLNGKEYKCKVSNKA |
| | | | LPAPIEKTISKAKGQPREPQVYTLPPSREEMTKNQVSLTCLVKGFYPSDIAVEWESNG |
| | | | QPENNYKTTPPVLDSDGSFFLYSKLTVDKSRWQQGNVFSCSVMHEALHNHYTQKSLSL |
| | | | SPGK |
| 2310 | CL 10D8 CC | artificial | QVQLVQSGAEVKKPGASVKVSCKASGYTFTGYYMHWVRQAPGQCLEWMGWINPNSGGT |
| | x I2E x | | KYAQKFQGRVTMTRDTSISTAYMELSRLRSDDTAVYYCARDRITVAGTYYYYGMDVWG |
| | scFc-Full | | QGTTVTVSSGGGGSGGGGSGGGGSDIQMTQSPSSVSASVGDRVTITCRASQGVNNWLA |
| | Sequence | | WYQQKPGKAPKLLIYTASSLQSGVPSRFSGSGSGTDFTLTIRSLQPEDFATYYCQQAN |
| | | | SFPITFGCGTRLEIKSGGGGSEVQLVESGGGLVQPGGSLKLSCAASGFTENKYAINWV |
| | | | RQAPGKGLEWVARIRSKYNNYATYYADAVKDRFTISRDDSKNTVYLQMNNLKTEDTAV |
| | | | YYCARAGNFGSSYISYWAYWGQGTLVTVSSGGGGSGGGGSGGGGSQTVVTQEPSLTVS |
| | | | PGGTVTITCGSSTGAVTSGNYPNWVQKKPGQAPRGLIGGTKFLAPGTPARFSGSLSGG |
| | | | KAALTLSGVQPEDEAEYYCVLWYSNRWVFGSGTKLTVLGGGGDKTHTCPPCPAPELLG |
| | | | GPSVFLFPPKPKDTLMISRTPEVTCVVVDVSHEDPEVKENWYVDGVEVHNAKTKPCEE |
| | | | QYGSTYRCVSVLTVLHQDWLNGKEYKCKVSNKALPAPIEKTISKAKGQPREPQVYTLP |
| | | | PSREEMTKNQVSLTCLVKGFYPSDIAVEWESNGQPENNYKTTPPVLDSDGSFFLYSKL |
| | | | TVDKSRWQQGNVFSCSVMHEALHNHYTQKSLSLSPGKGGGGSGGGGSGGGGSGGGGSG |
| | | | GGGSGGGGSDKTHTCPPCPAPELLGGPSVFLFPPKPKDTLMISRTPEVTCVVVDVSHE |
| | | | DPEVKFNWYVDGVEVHNAKTKPCEEQYGSTYRCVSVLTVLHQDWLNGKEYKCKVSNKA |
| | | | LPAPIEKTISKAKGQPREPQVYTLPPSREEMTKNQVSLTCLVKGFYPSDIAVEWESNG |
| | | | QPENNYKTTPPVLDSDGSFFLYSKLTVDKSRWQQGNVFSCSVMHEALHNHYTQKSLSL |
| | | | SPGK |
| 2311 | CL 10D8 CC | artificial | QVQLVQSGAEVKKPGASVKVSCKASGYTFTGYYMHWVRQAPGQCLEWMGWINPNSGGT |
| | x I2K x | | KYAQKFQGRVTMTRDTSISTAYMELSRLRSDDTAVYYCARDRITVAGTYYYYGMDVWG |
| | scFc-Full | | QGTTVTVSSGGGGSGGGGSGGGGSDIQMTQSPSSVSASVGDRVTITCRASQGVNNWLA |
| | Sequence | | WYQQKPGKAPKLLIYTASSLQSGVPSRFSGSGSGTDFTLTIRSLQPEDFATYYCQQAN |
| | | | SFPITFGCGTRLEIKSGGGGSEVQLVESGGGLVQPGGSLKLSCAASGFTFNKYAMNWV |
| | | | RQAPGKGLEWVARIRSKYNNYATYYAEAVKGRFTISRDDSKNTVYLQMNNLKTEDTAV |
| | | | YYCVRNENIGTSYISYWAYWGQGTLVTVSSGGGGSGGGGSGGGGSQTVVTQEPSLTVS |
| | | | PGGTVTITCGSSTGAVTSGNYPNWVQQKPGQAPRGLIGGTKFLAPGTPARFSGSLSGG |
| | | | KAALTLSGVQPEDEAEYYCVLWYSNRWVFGSGTKLTVLGGGGDKTHTCPPCPAPELLG |
| | | | GPSVFLFPPKPKDTLMISRTPEVTCVVVDVSHEDPEVKFNWYVDGVEVHNAKTKPCEE |
| | | | QYGSTYRCVSVLTVLHQDWLNGKEYKCKVSNKALPAPIEKTISKAKGQPREPQVYTLP |
| | | | PSREEMTKNQVSLTCLVKGFYPSDIAVEWESNGQPENNYKTTPPVLDSDGSFFLYSKL |
| | | | TVDKSRWQQGNVFSCSVMHEALHNHYTQKSLSLSPGKGGGGSGGGGSGGGGSGGGGSG |
| | | | GGGSGGGGSDKTHTCPPCPAPELLGGPSVFLFPPKPKDTLMISRTPEVTCVVVDVSHE |
| | | | DPEVKFNWYVDGVEVHNAKTKPCEEQYGSTYRCVSVLTVLHQDWLNGKEYKCKVSNKA |
| | | | LPAPIEKTISKAKGQPREPQVYTLPPSREEMTKNQVSLTCLVKGFYPSDIAVEWESNG |
| | | | QPENNYKTTPPVLDSDGSFFLYSKLTVDKSRWQQGNVFSCSVMHEALHNHYTQKSLSL |
| | | | SPGK |
| 2312 | CL 10D8 CC | artificial | QVQLVQSGAEVKKPGASVKVSCKASGYTFTGYYMHWVRQAPGQCLEWMGWINPNSGGT |
| | x I2L x | | KYAQKFQGRVTMTRDTSISTAYMELSRLRSDDTAVYYCARDRITVAGTYYYYGMDVWG |
| | scFc-Full | | QGTTVTVSSGGGGSGGGGSGGGGSDIQMTQSPSSVSASVGDRVTITCRASQGVNNWLA |
| | Sequence | | WYQQKPGKAPKLLIYTASSLQSGVPSRFSGSGSGTDFTLTIRSLQPEDFATYYCQQAN |
| | | | SFPITFGCGTRLEIKSGGGGSEVQLVESGGGLVQPGGSLKLSCAASGFTENKYAMNWV |
| | | | RQAPGKGMEWVARIRSKYNNYATYYADAVKDRFTISRDDSKNTLYLQMNNLKTEDTAV |
| | | | YYCVRAGNFGSSYISYFAYWGQGTLVTVSSGGGGSGGGGSGGGGSQTVVTQEPSLTVS |
| | | | PGGTVTITCGSSTGAVTSGNYPNWIQKKPGQAPRGLIGGTKFLAPGTPARFSGSLEGG |
| | | | KAALTLSGVQPEDEAEYYCVLYYSNRWVFGSGTKLTVLGGGGDKTHTCPPCPAPELLG |
| | | | GPSVFLFPPKPKDTLMISRTPEVTCVVVDVSHEDPEVKENWYVDGVEVHNAKTKPCEE |
| | | | QYGSTYRCVSVLTVLHQDWLNGKEYKCKVSNKALPAPIEKTISKAKGQPREPQVYTLP |
| | | | PSREEMTKNQVSLTCLVKGFYPSDIAVEWESNGQPENNYKTTPPVLDSDGSFFLYSKL |
| | | | TVDKSRWQQGNVFSCSVMHEALHNHYTQKSLSLSPGKGGGGSGGGGSGGGGSGGGGSG |
| | | | GGGSGGGGSDKTHTCPPCPAPELLGGPSVFLFPPKPKDTLMISRTPEVTCVVVDVSHE |
| | | | DPEVKFNWYVDGVEVHNAKTKPCEEQYGSTYRCVSVLTVLHQDWLNGKEYKCKVSNKA |
| | | | LPAPIEKTISKAKGQPREPQVYTLPPSREEMTKNQVSLTCLVKGFYPSDIAVEWESNG |
| | | | QPENNYKTTPPVLDSDGSFFLYSKLTVDKSRWQQGNVFSCSVMHEALHNHYTQKSLSL |
| | | | SPGK |
| 2313 | CL 10D8 CC | artificial | QVQLVQSGAEVKKPGASVKVSCKASGYTFTGYYMHWVRQAPGQCLEWMGWINPNSGGT |
| | x I2M x | | KYAQKFQGRVTMTRDTSISTAYMELSRLRSDDTAVYYCARDRITVAGTYYYYGMDVWG |
| | scFc-Full | | QGTTVTVSSGGGGSGGGGSGGGGSDIQMTQSPSSVSASVGDRVTITCRASQGVNNWLA |
| | Sequence | | WYQQKPGKAPKLLIYTASSLQSGVPSRFSGSGSGTDFTLTIRSLQPEDFATYYCQQAN |
| | | | SFPITFGCGTRLEIKSGGGGSEVQLVESGGGLVQPGGSLKLSCAASGFTENKYAMNWV |
| | | | RQAPGKGMEWVARIRSKYNNYATYYADAVKDRFTISRDDSKNTLYLQMNNLKTEDTAV |
| | | | YYCVRAGNFGTSYISYWAYWGQGTLVTVSSGGGGSGGGGSGGGGSQTVVTQEPSLTVS |
| | | | PGGTVTITCGSSTGAVTSGNYPNWVQKKPGQAPRGLIGGTKFLAPGTPARFSGSLSGG |
| | | | KAALTLSGVQPEDEAEYYCVLWYSNRWVFGSGTKLTVLGGGGDKTHTCPPCPAPELLG |
| | | | GPSVFLFPPKPKDTLMISRTPEVTCVVVDVSHEDPEVKENWYVDGVEVHNAKTKPCEE |
| | | | QYGSTYRCVSVLTVLHQDWLNGKEYKCKVSNKALPAPIEKTISKAKGQPREPQVYTLP |
| | | | PSREEMTKNQVSLTCLVKGFYPSDIAVEWESNGQPENNYKTTPPVLDSDGSFFLYSKL |
| | | | TVDKSRWQQGNVFSCSVMHEALHNHYTQKSLSLSPGKGGGGSGGGGSGGGGSGGGGSG |
| | | | GGGSGGGGSDKTHTCPPCPAPELLGGPSVFLFPPKPKDTLMISRTPEVTCVVVDVSHE |
| | | | DPEVKFNWYVDGVEVHNAKTKPCEEQYGSTYRCVSVLTVLHQDWLNGKEYKCKVSNKA |
| | | | LPAPIEKTISKAKGQPREPQVYTLPPSREEMTKNQVSLTCLVKGFYPSDIAVEWESNG |
| | | | QPENNYKTTPPVLDSDGSFFLYSKLTVDKSRWQQGNVFSCSVMHEALHNHYTQKSLSL |
| | | | SPGK |
| 2314 | CL 10D8 CC | artificial | QVQLVQSGAEVKKPGASVKVSCKASGYTFTGYYMHWVRQAPGQCLEWMGWINPNSGGT |
| | x I2M2 x | | KYAQKFQGRVTMTRDTSISTAYMELSRLRSDDTAVYYCARDRITVAGTYYYYGMDVWG |
| | scFc-Full | | QGTTVTVSSGGGGSGGGGSGGGGSDIQMTQSPSSVSASVGDRVTITCRASQGVNNWLA |
| | Sequence | | WYQQKPGKAPKLLIYTASSLQSGVPSRFSGSGSGTDFTLTIRSLQPEDFATYYCQQAN |
| | | | SFPITFGCGTRLEIKSGGGGSEVQLVESGGGLVQPGGSLKLSCAASGFTENKYAINWV |
| | | | REAPGKGLEWVARIRSKYNNYATYYADAVKDRFTISRDDSKNTAYLQMNNLKTEDTAV |
| | | | YYCVRNANFGTSYISYFAYWGQGTLVTVSSGGGGSGGGGSGGGGSQTVVTQEPSLTVS |
| | | | PGGTVTLTCGSSTGAVTSGNYPNWVQKKPGQAPRGLIGGTKFLAPGTPARFSGSLLGG |
| | | | KAALTLSGVQPEDEAEYYCVLWYSNRWVFGSGTKLTVLGGGGDKTHTCPPCPAPELLG |
| | | | GPSVFLFPPKPKDTLMISRTPEVTCVVVDVSHEDPEVKFNWYVDGVEVHNAKTKPCEE |
| | | | QYGSTYRCVSVLTVLHQDWLNGKEYKCKVSNKALPAPIEKTISKAKGQPREPQVYTLP |
| | | | PSREEMTKNQVSLTCLVKGFYPSDIAVEWESNGQPENNYKTTPPVLDSDGSFFLYSKL |
| | | | TVDKSRWQQGNVFSCSVMHEALHNHYTQKSLSLSPGKGGGGSGGGGSGGGGSGGGGSG |
| | | | GGGSGGGGSDKTHTCPPCPAPELLGGPSVFLFPPKPKDTLMISRTPEVTCVVVDVSHE |
| | | | DPEVKFNWYVDGVEVHNAKTKPCEEQYGSTYRCVSVLTVLHQDWLNGKEYKCKVSNKA |
| | | | LPAPIEKTISKAKGQPREPQVYTLPPSREEMTKNQVSLTCLVKGFYPSDIAVEWESNG |
| | | | QPENNYKTTPPVLDSDGSFFLYSKLTVDKSRWQQGNVFSCSVMHEALHNHYTQKSLSL |
| | | | SPGK |
| 2315 | DL 8-A7 CC | artificial | SYYWS |
| | -HCDR1 | | |
| 2316 | DL 8-A7 CC | artificial | YVYYSGTTNYNPSLKS |
| | -HCDR2 | | |
| 2317 | DL 8-A7 CC | artificial | IAVTGFYFDY |
| | -HCDR3 | | |
| 2318 | DL 8-A7 CC | artificial | RASQRVNNNYLA |
| | -LCDR1 | | |
| 2319 | DL 8-A7 CC | artificial | GASSRAT |
| | -LCDR2 | | |
| 2320 | DL 8-A7 CC | artificial | QQYDRSPLT |
| | -LCDR3 | | |
| 2321 | DL 8-A7 CC | artificial | QVQLQESGPGLVKPSETLSLTCTVSGGSISSYYWSWIRQPPGKCLEWIGYVYYSGTTN |
| | -VH | | YNPSLKSRVTISVDTSKNQFSLKLSSVTAADTAVYYCASIAVTGFYFDYWGQGTLVTV |
| | | | SS |
| 2322 | DL 8-A7 CC | artificial | EIVLTQSPGTLSLSPGERVTLSCRASQRVNNNYLAWYQQRPGQAPRLLIYGASSRATG |
| | -VL | | IPDRESGSGSGTDFTLTISRLEPEDFAVYYCQQYDRSPLTFGCGTKLEIK |
| 2323 | DL 8-A7 CC | artificial | QVQLQESGPGLVKPSETLSLTCTVSGGSISSYYWSWIRQPPGKCLEWIGYVYYSGTTN |
| | x I2C x | | YNPSLKSRVTISVDTSKNQFSLKLSSVTAADTAVYYCASIAVTGFYFDYWGQGTLVTV |
| | SCFc-Full | | SSGGGGSGGGGSGGGGSEIVLTQSPGTLSLSPGERVTLSCRASQRVNNNYLAWYQQRP |
| | Sequence | | GQAPRLLIYGASSRATGIPDRESGSGSGTDFTLTISRLEPEDFAVYYCQQYDRSPLTF |
| | | | GCGTKLEIKSGGGGSEVQLVESGGGLVQPGGSLKLSCAASGFTENKYAMNWVRQAPGK |
| | | | GLEWVARIRSKYNNYATYYADSVKDRFTISRDDSKNTAYLQMNNLKTEDTAVYYCVRH |
| | | | GNFGNSYISYWAYWGQGTLVTVSSGGGGSGGGGSGGGGSQTVVTQEPSLTVSPGGTVT |
| | | | LTCGSSTGAVTSGNYPNWVQQKPGQAPRGLIGGTKFLAPGTPARFSGSLLGGKAALTL |
| | | | SGVQPEDEAEYYCVLWYSNRWVFGGGTKLTVLGGGGDKTHTCPPCPAPELLGGPSVFL |
| | | | FPPKPKDTLMISRTPEVTCVVVDVSHEDPEVKFNWYVDGVEVHNAKTKPCEEQYGSTY |
| | | | RCVSVLTVLHQDWLNGKEYKCKVSNKALPAPIEKTISKAKGQPREPQVYTLPPSREEM |
| | | | TKNQVSLTCLVKGFYPSDIAVEWESNGQPENNYKTTPPVLDSDGSFFLYSKLTVDKSR |
| | | | WQQGNVFSCSVMHEALHNHYTQKSLSLSPGGGGSGGGGSGGGGSGGGGSGGGGSGGGG |
| | | | SDKTHTCPPCPAPELLGGPSVFLFPPKPKDTLMISRTPEVTCVVVDVSHEDPEVKENW |
| | | | YVDGVEVHNAKTKPCEEQYGSTYRCVSVLTVLHQDWLNGKEYKCKVSNKALPAPIEKT |
| | | | ISKAKGQPREPQVYTLPPSREEMTKNQVSLTCLVKGFYPSDIAVEWESNGQPENNYKT |
| | | | TPPVLDSDGSFFLYSKLTVDKSRWQQGNVFSCSVMHEALHNHYTQKSLSLSPGK |
| 2324 | DL 8-A7 CC | artificial | QVQLQESGPGLVKPSETLSLTCTVSGGSISSYYWSWIRQPPGKCLEWIGYVYYSGTTN |
| | x I2E x | | YNPSLKSRVTISVDTSKNQFSLKLSSVTAADTAVYYCASIAVTGFYFDYWGQGTLVTV |
| | scFc-Full | | SSGGGGSGGGGSGGGGSEIVLTQSPGTLSLSPGERVTLSCRASQRVNNNYLAWYQQRP |
| | Sequence | | GQAPRLLIYGASSRATGIPDRFSGSGSGTDFTLTISRLEPEDFAVYYCQQYDRSPLTF |
| | | | GCGTKLEIKSGGGGSEVQLVESGGGLVQPGGSLKLSCAASGFTFNKYAINWVRQAPGK |
| | | | GLEWVARIRSKYNNYATYYADAVKDRFTISRDDSKNTVYLQMNNLKTEDTAVYYCARA |
| | | | GNFGSSYISYWAYWGQGTLVTVSSGGGGSGGGGSGGGGSQTVVTQEPSLTVSPGGTVT |
| | | | ITCGSSTGAVTSGNYPNWVQKKPGQAPRGLIGGTKFLAPGTPARFSGSLSGGKAALTL |
| | | | SGVQPEDEAEYYCVLWYSNRWVFGSGTKLTVLGGGGDKTHTCPPCPAPELLGGPSVFL |
| | | | FPPKPKDTLMISRTPEVTCVVVDVSHEDPEVKFNWYVDGVEVHNAKTKPCEEQYGSTY |
| | | | RCVSVLTVLHQDWLNGKEYKCKVSNKALPAPIEKTISKAKGQPREPQVYTLPPSREEM |
| | | | TKNQVSLTCLVKGFYPSDIAVEWESNGQPENNYKTTPPVLDSDGSFFLYSKLTVDKSR |
| | | | WQQGNVFSCSVMHEALHNHYTQKSLSLSPGGGGSGGGGSGGGGSGGGGSGGGGSGGGG |
| | | | SDKTHTCPPCPAPELLGGPSVFLFPPKPKDTLMISRTPEVTCVVVDVSHEDPEVKENW |
| | | | YVDGVEVHNAKTKPCEEQYGSTYRCVSVLTVLHQDWLNGKEYKCKVSNKALPAPIEKT |
| | | | ISKAKGQPREPQVYTLPPSREEMTKNQVSLTCLVKGFYPSDIAVEWESNGQPENNYKT |
| | | | TPPVLDSDGSFFLYSKLTVDKSRWQQGNVFSCSVMHEALHNHYTQKSLSLSPGK |
| 2325 | DL 8-A7 CC | artificial | QVQLQESGPGLVKPSETLSLTCTVSGGSISSYYWSWIRQPPGKCLEWIGYVYYSGTTN |
| | x I2K x | | YNPSLKSRVTISVDTSKNQFSLKLSSVTAADTAVYYCASIAVTGFYFDYWGQGTLVTV |
| | ScFc-Full | | SSGGGGSGGGGSGGGGSEIVLTQSPGTLSLSPGERVTLSCRASQRVNNNYLAWYQQRP |
| | Sequence | | GQAPRLLIYGASSRATGIPDRFSGSGSGTDFTLTISRLEPEDFAVYYCQQYDRSPLTF |
| | | | GCGTKLEIKSGGGGSEVQLVESGGGLVQPGGSLKLSCAASGFTENKYAMNWVRQAPGK |
| | | | GLEWVARIRSKYNNYATYYAEAVKGRFTISRDDSKNTVYLQMNNLKTEDTAVYYCVRN |
| | | | ENIGTSYISYWAYWGQGTLVTVSSGGGGSGGGGSGGGGSQTVVTQEPSLTVSPGGTVT |
| | | | ITCGSSTGAVTSGNYPNWVQQKPGQAPRGLIGGTKFLAPGTPARFSGSLSGGKAALTL |
| | | | SGVQPEDEAEYYCVLWYSNRWVFGSGTKLTVLGGGGDKTHTCPPCPAPELLGGPSVEL |
| | | | FPPKPKDTLMISRTPEVTCVVVDVSHEDPEVKFNWYVDGVEVHNAKTKPCEEQYGSTY |
| | | | RCVSVLTVLHQDWLNGKEYKCKVSNKALPAPIEKTISKAKGQPREPQVYTLPPSREEM |
| | | | TKNQVSLTCLVKGFYPSDIAVEWESNGQPENNYKTTPPVLDSDGSFFLYSKLTVDKSR |
| | | | WQQGNVFSCSVMHEALHNHYTQKSLSLSPGGGGSGGGGSGGGGSGGGGSGGGGSGGGG |
| | | | SDKTHTCPPCPAPELLGGPSVFLFPPKPKDTLMISRTPEVTCVVVDVSHEDPEVKENW |
| | | | YVDGVEVHNAKTKPCEEQYGSTYRCVSVLTVLHQDWLNGKEYKCKVSNKALPAPIEKT |
| | | | ISKAKGQPREPQVYTLPPSREEMTKNQVSLTCLVKGFYPSDIAVEWESNGQPENNYKT |
| | | | TPPVLDSDGSFFLYSKLTVDKSRWQQGNVFSCSVMHEALHNHYTQKSLSLSPGK |
| 2326 | DL 8-A7 CC | artificial | QVQLQESGPGLVKPSETLSLTCTVSGGSISSYYWSWIRQPPGKCLEWIGYVYYSGTTN |
| | x I2L x | | YNPSLKSRVTISVDTSKNQFSLKLSSVTAADTAVYYCASIAVTGFYFDYWGQGTLVTV |
| | scFc-Full | | SSGGGGSGGGGSGGGGSEIVLTQSPGTLSLSPGERVTLSCRASQRVNNNYLAWYQQRP |
| | Sequence | | GQAPRLLIYGASSRATGIPDRESGSGSGTDFTLTISRLEPEDFAVYYCQQYDRSPLTF |
| | | | GCGTKLEIKSGGGGSEVQLVESGGGLVQPGGSLKLSCAASGFTFNKYAMNWVRQAPGK |
| | | | GMEWVARIRSKYNNYATYYADAVKDRFTISRDDSKNTLYLQMNNLKTEDTAVYYCVRA |
| | | | GNFGSSYISYFAYWGQGTLVTVSSGGGGSGGGGSGGGGSQTVVTQEPSLTVSPGGTVT |
| | | | ITCGSSTGAVTSGNYPNWIQKKPGQAPRGLIGGTKFLAPGTPARFSGSLEGGKAALTL |
| | | | SGVQPEDEAEYYCVLYYSNRWVFGSGTKLTVLGGGGDKTHTCPPCPAPELLGGPSVFL |
| | | | FPPKPKDTLMISRTPEVTCVVVDVSHEDPEVKFNWYVDGVEVHNAKTKPCEEQYGSTY |
| | | | RCVSVLTVLHQDWLNGKEYKCKVSNKALPAPIEKTISKAKGQPREPQVYTLPPSREEM |
| | | | TKNQVSLTCLVKGFYPSDIAVEWESNGQPENNYKTTPPVLDSDGSFFLYSKLTVDKSR |
| | | | WQQGNVFSCSVMHEALHNHYTQKSLSLSPGGGGSGGGGSGGGGSGGGGSGGGGSGGGG |
| | | | SDKTHTCPPCPAPELLGGPSVFLFPPKPKDTLMISRTPEVTCVVVDVSHEDPEVKENW |
| | | | YVDGVEVHNAKTKPCEEQYGSTYRCVSVLTVLHQDWLNGKEYKCKVSNKALPAPIEKT |
| | | | ISKAKGQPREPQVYTLPPSREEMTKNQVSLTCLVKGFYPSDIAVEWESNGQPENNYKT |
| | | | TPPVLDSDGSFFLYSKLTVDKSRWQQGNVFSCSVMHEALHNHYTQKSLSLSPGK |
| 2327 | DL 8-A7 CC | artificial | QVQLQESGPGLVKPSETLSLTCTVSGGSISSYYWSWIRQPPGKCLEWIGYVYYSGTTN |
| | x I2M x | | YNPSLKSRVTISVDTSKNQFSLKLSSVTAADTAVYYCASIAVTGFYFDYWGQGTLVTV |
| | scFc-Full | | SSGGGGSGGGGSGGGGSEIVLTQSPGTLSLSPGERVTLSCRASQRVNNNYLAWYQQRP |
| | Sequence | | GQAPRLLIYGASSRATGIPDRFSGSGSGTDFTLTISRLEPEDFAVYYCQQYDRSPLTF |
| | | | GCGTKLEIKSGGGGSEVQLVESGGGLVQPGGSLKLSCAASGFTFNKYAMNWVRQAPGK |
| | | | GMEWVARIRSKYNNYATYYADAVKDRFTISRDDSKNTLYLQMNNLKTEDTAVYYCVRA |
| | | | GNFGTSYISYWAYWGQGTLVTVSSGGGGSGGGGSGGGGSQTVVTQEPSLTVSPGGTVT |
| | | | ITCGSSTGAVTSGNYPNWVQKKPGQAPRGLIGGTKFLAPGTPARFSGSLSGGKAALTL |
| | | | SGVQPEDEAEYYCVLWYSNRWVFGSGTKLTVLGGGGDKTHTCPPCPAPELLGGPSVFL |
| | | | FPPKPKDTLMISRTPEVTCVVVDVSHEDPEVKFNWYVDGVEVHNAKTKPCEEQYGSTY |
| | | | RCVSVLTVLHQDWLNGKEYKCKVSNKALPAPIEKTISKAKGQPREPQVYTLPPSREEM |
| | | | TKNQVSLTCLVKGFYPSDIAVEWESNGQPENNYKTTPPVLDSDGSFFLYSKLTVDKSR |
| | | | WQQGNVFSCSVMHEALHNHYTQKSLSLSPGGGGSGGGGSGGGGSGGGGSGGGGSGGGG |
| | | | SDKTHTCPPCPAPELLGGPSVFLFPPKPKDTLMISRTPEVTCVVVDVSHEDPEVKENW |
| | | | YVDGVEVHNAKTKPCEEQYGSTYRCVSVLTVLHQDWLNGKEYKCKVSNKALPAPIEKT |
| | | | ISKAKGQPREPQVYTLPPSREEMTKNQVSLTCLVKGFYPSDIAVEWESNGQPENNYKT |
| | | | TPPVLDSDGSFFLYSKLTVDKSRWQQGNVFSCSVMHEALHNHYTQKSLSLSPGK |
| 2328 | DL 8-A7 CC | artificial | QVQLQESGPGLVKPSETLSLTCTVSGGSISSYYWSWIRQPPGKCLEWIGYVYYSGTTN |
| | x I2M2 x | | YNPSLKSRVTISVDTSKNQFSLKLSSVTAADTAVYYCASIAVTGFYFDYWGQGTLVTV |
| | scFc-Full | | SSGGGGSGGGGSGGGGSEIVLTQSPGTLSLSPGERVTLSCRASQRVNNNYLAWYQQRP |
| | Sequence | | GQAPRLLIYGASSRATGIPDRFSGSGSGTDFTLTISRLEPEDFAVYYCQQYDRSPLTF |
| | | | GCGTKLEIKSGGGGSEVQLVESGGGLVQPGGSLKLSCAASGFTENKYAINWVREAPGK |
| | | | GLEWVARIRSKYNNYATYYADAVKDRFTISRDDSKNTAYLQMNNLKTEDTAVYYCVRN |
| | | | ANFGTSYISYFAYWGQGTLVTVSSGGGGSGGGGSGGGGSQTVVTQEPSLTVSPGGTVT |
| | | | LTCGSSTGAVTSGNYPNWVQKKPGQAPRGLIGGTKFLAPGTPARFSGSLLGGKAALTL |
| | | | SGVQPEDEAEYYCVLWYSNRWVFGSGTKLTVLGGGGDKTHTCPPCPAPELLGGPSVFL |
| | | | FPPKPKDTLMISRTPEVTCVVVDVSHEDPEVKFNWYVDGVEVHNAKTKPCEEQYGSTY |
| | | | RCVSVLTVLHQDWLNGKEYKCKVSNKALPAPIEKTISKAKGQPREPQVYTLPPSREEM |
| | | | TKNQVSLTCLVKGFYPSDIAVEWESNGQPENNYKTTPPVLDSDGSFFLYSKLTVDKSR |
| | | | WQQGNVFSCSVMHEALHNHYTQKSLSLSPGGGGSGGGGSGGGGSGGGGSGGGGSGGGG |
| | | | SDKTHTCPPCPAPELLGGPSVFLFPPKPKDTLMISRTPEVTCVVVDVSHEDPEVKENW |
| | | | YVDGVEVHNAKTKPCEEQYGSTYRCVSVLTVLHQDWLNGKEYKCKVSNKALPAPIEKT |
| | | | ISKAKGQPREPQVYTLPPSREEMTKNQVSLTCLVKGFYPSDIAVEWESNGQPENNYKT |
| | | | TPPVLDSDGSFFLYSKLTVDKSRWQQGNVFSCSVMHEALHNHYTQKSLSLSPGK |
| 2329 | EGFRvIII CC | artificial | NYGMH |
| | -HCDR1 | | |
| 2330 | EGFRvIII CC | artificial | VIWYDGSDKYYADSVRG |
| | -HCDR2 | | |
| 2331 | EGFRvIII CC | artificial | DGYDILTGNPRDEDY |
| | -HCDR3 | | |
| 2332 | EGFRvIII CC | artificial | RSSQSLVHSDGNTYLS |
| | -LCDR1 | | |
| 2333 | EGFRvIII CC | artificial | RISRRFS |
| | -LCDR2 | | |
| 2334 | EGFRvIII CC | artificial | MQSTHVPRT |
| | -LCDR3 | | |
| 2335 | EGFRvIII CC | artificial | QVQLVESGGGVVQSGRSLRLSCAASGFTFRNYGMHWVRQAPGKCLEWVAVIWYDGSDK |
| | -VH | | YYADSVRGRFTISRDNSKNTLYLQMNSLRAEDTAVYYCARDGYDILTGNPRDFDYWGQ |
| | | | GTLVTVSS |
| 2336 | EGFRvIII CC | artificial | DTVMTQTPLSSHVTLGQPASISCRSSQSLVHSDGNTYLSWLQQRPGQPPRLLIYRISR |
| | -VL | | RFSGVPDRFSGSGAGTDFTLEISRVEAEDVGVYYCMQSTHVPRTFGCGTKVEIK |
| 2337 | EGFRvIII CC | artificial | QVQLVESGGGVVQSGRSLRLSCAASGFTFRNYGMHWVRQAPGKCLEWVAVIWYDGSDK |
| | x I2C- | | YYADSVRGRFTISRDNSKNTLYLQMNSLRAEDTAVYYCARDGYDILTGNPRDFDYWGQ |
| | Full | | GTLVTVSSGGGGSGGGGSGGGGSDTVMTQTPLSSHVTLGQPASISCRSSQSLVHSDGN |
| | Sequence | | TYLSWLQQRPGQPPRLLIYRISRRFSGVPDRFSGSGAGTDFTLEISRVEAEDVGVYYC |
| | | | MQSTHVPRTFGCGTKVEIKSGGGGSEVQLVESGGGLVQPGGSLKLSCAASGFTENKYA |
| | | | MNWVRQAPGKGLEWVARIRSKYNNYATYYADSVKDRFTISRDDSKNTAYLQMNNLKTE |
| | | | DTAVYYCVRHGNFGNSYISYWAYWGQGTLVTVSSGGGGSGGGGSGGGGSQTVVTQEPS |
| | | | LTVSPGGTVTLTCGSSTGAVTSGNYPNWVQQKPGQAPRGLIGGTKFLAPGTPARFSGS |
| | | | LLGGKAALTLSGVQPEDEAEYYCVLWYSNRWVFGGGTKLTVL |
| 2338 | EGFRvIII CC | artificial | QVQLVESGGGVVQSGRSLRLSCAASGFTFRNYGMHWVRQAPGKCLEWVAVIWYDGSDK |
| | x I2E- | | YYADSVRGRFTISRDNSKNTLYLQMNSLRAEDTAVYYCARDGYDILTGNPRDFDYWGQ |
| | Full | | GTLVTVSSGGGGSGGGGSGGGGSDTVMTQTPLSSHVTLGQPASISCRSSQSLVHSDGN |
| | Sequence | | TYLSWLQQRPGQPPRLLIYRISRRFSGVPDRFSGSGAGTDFTLEISRVEAEDVGVYYC |
| | | | MQSTHVPRTFGCGTKVEIKSGGGGSEVQLVESGGGLVQPGGSLKLSCAASGFTFNKYA |
| | | | INWVRQAPGKGLEWVARIRSKYNNYATYYADAVKDRFTISRDDSKNTVYLQMNNLKTE |
| | | | DTAVYYCARAGNFGSSYISYWAYWGQGTLVTVSSGGGGSGGGGSGGGGSQTVVTQEPS |
| | | | LTVSPGGTVTITCGSSTGAVTSGNYPNWVQKKPGQAPRGLIGGTKFLAPGTPARFSGS |
| | | | LSGGKAALTLSGVQPEDEAEYYCVLWYSNRWVFGSGTKLTVL |
| 2339 | EGFRvIII CC | artificial | QVQLVESGGGVVQSGRSLRLSCAASGFTFRNYGMHWVRQAPGKCLEWVAVIWYDGSDK |
| | x I2K- | | YYADSVRGRFTISRDNSKNTLYLQMNSLRAEDTAVYYCARDGYDILTGNPRDEDYWGQ |
| | Full | | GTLVTVSSGGGGSGGGGSGGGGSDTVMTQTPLSSHVTLGQPASISCRSSQSLVHSDGN |
| | Sequence | | TYLSWLQQRPGQPPRLLIYRISRRFSGVPDRFSGSGAGTDFTLEISRVEAEDVGVYYC |
| | | | MQSTHVPRTFGCGTKVEIKSGGGGSEVQLVESGGGLVQPGGSLKLSCAASGFTENKYA |
| | | | MNWVRQAPGKGLEWVARIRSKYNNYATYYAEAVKGRFTISRDDSKNTVYLQMNNLKTE |
| | | | DTAVYYCVRNENIGTSYISYWAYWGQGTLVTVSSGGGGSGGGGSGGGGSQTVVTQEPS |
| | | | LTVSPGGTVTITCGSSTGAVTSGNYPNWVQQKPGQAPRGLIGGTKFLAPGTPARFSGS |
| | | | LSGGKAALTLSGVQPEDEAEYYCVLWYSNRWVFGSGTKLTVL |
| 2340 | EGFRvIII CC | artificial | QVQLVESGGGVVQSGRSLRLSCAASGFTFRNYGMHWVRQAPGKCLEWVAVIWYDGSDK |
| | x I2L- | | YYADSVRGRFTISRDNSKNTLYLQMNSLRAEDTAVYYCARDGYDILTGNPRDFDYWGQ |
| | Full | | GTLVTVSSGGGGSGGGGSGGGGSDTVMTQTPLSSHVTLGQPASISCRSSQSLVHSDGN |
| | Sequence | | TYLSWLQQRPGQPPRLLIYRISRRFSGVPDRESGSGAGTDFTLEISRVEAEDVGVYYC |
| | | | MQSTHVPRTFGCGTKVEIKSGGGGSEVQLVESGGGLVQPGGSLKLSCAASGFTENKYA |
| | | | MNWVRQAPGKGMEWVARIRSKYNNYATYYADAVKDRFTISRDDSKNTLYLQMNNLKTE |
| | | | DTAVYYCVRAGNFGSSYISYFAYWGQGTLVTVSSGGGGSGGGGSGGGGSQTVVTQEPS |
| | | | LTVSPGGTVTITCGSSTGAVTSGNYPNWIQKKPGQAPRGLIGGTKFLAPGTPARFSGS |
| | | | LEGGKAALTLSGVQPEDEAEYYCVLYYSNRWVFGSGTKLTVL |
| 2341 | EGFRvIII CC | artificial | QVQLVESGGGVVQSGRSLRLSCAASGFTFRNYGMHWVRQAPGKCLEWVAVIWYDGSDK |
| | x I2M- | | YYADSVRGRFTISRDNSKNTLYLQMNSLRAEDTAVYYCARDGYDILTGNPRDEDYWGQ |
| | Full | | GTLVTVSSGGGGSGGGGSGGGGSDTVMTQTPLSSHVTLGQPASISCRSSQSLVHSDGN |
| | Sequence | | TYLSWLQQRPGQPPRLLIYRISRRFSGVPDRFSGSGAGTDFTLEISRVEAEDVGVYYC |
| | | | MQSTHVPRTFGCGTKVEIKSGGGGSEVQLVESGGGLVQPGGSLKLSCAASGFTENKYA |
| | | | MNWVRQAPGKGMEWVARIRSKYNNYATYYADAVKDRFTISRDDSKNTLYLQMNNLKTE |
| | | | DTAVYYCVRAGNFGTSYISYWAYWGQGTLVTVSSGGGGSGGGGSGGGGSQTVVTQEPS |
| | | | LTVSPGGTVTITCGSSTGAVTSGNYPNWVQKKPGQAPRGLIGGTKFLAPGTPARFSGS |
| | | | LSGGKAALTLSGVQPEDEAEYYCVLWYSNRWVFGSGTKLTVL |
| 2342 | EGFRvIII CC | artificial | QVQLVESGGGVVQSGRSLRLSCAASGFTFRNYGMHWVRQAPGKCLEWVAVIWYDGSDK |
| | x I2M2- | | YYADSVRGRFTISRDNSKNTLYLQMNSLRAEDTAVYYCARDGYDILTGNPRDEDYWGQ |
| | Full | | GTLVTVSSGGGGSGGGGSGGGGSDTVMTQTPLSSHVTLGQPASISCRSSQSLVHSDGN |
| | Sequence | | TYLSWLQQRPGQPPRLLIYRISRRFSGVPDRFSGSGAGTDFTLEISRVEAEDVGVYYC |
| | | | MQSTHVPRTFGCGTKVEIKSGGGGSEVQLVESGGGLVQPGGSLKLSCAASGFTENKYA |
| | | | INWVREAPGKGLEWVARIRSKYNNYATYYADAVKDRFTISRDDSKNTAYLQMNNLKTE |
| | | | DTAVYYCVRNANFGTSYISYFAYWGQGTLVTVSSGGGGSGGGGSGGGGSQTVVTQEPS |
| | | | LTVSPGGTVTLTCGSSTGAVTSGNYPNWVQKKPGQAPRGLIGGTKFLAPGTPARFSGS |
| | | | LLGGKAALTLSGVQPEDEAEYYCVLWYSNRWVFGSGTKLTVL |
| 2343 | FL 7-A8 CC | artificial | NARMGVS |
| | -HCDR1 | | |
| 2344 | FL 7-A8 CC | artificial | HIFSNDEKSYSTSLKN |
| | -HCDR2 | | |
| 2345 | FL 7-A8 CC | artificial | IVGYGSGWYGFFDY |
| | -HCDR3 | | |
| 2346 | FL 7-A8 CC | artificial | RASQGIRNDLG |
| | -LCDR1 | | |
| 2347 | FL 7-A8 CC | artificial | AASTLQS |
| | -LCDR2 | | |
| 2348 | FL 7-A8 CC | artificial | LQHNSYPLT |
| | -LCDR3 | | |
| 2349 | FL 7-A8 CC | artificial | QVTLKESGPTLVKPTETLTLTCTLSGFSLNNARMGVSWIRQPPGKCLEWLAHIFSNDE |
| | -VH | | KSYSTSLKNRLTISKDSSKTQVVLTMTNVDPVDTATYYCARIVGYGSGWYGFFDYWGQ |
| | | | GTLVTVSS |
| 2350 | FL 7-A8 CC | artificial | DIQMTQSPSSLSASVGDRVTITCRASQGIRNDLGWYQQKPGKAPKRLIYAASTLQSGV |
| | -VL | | PSRFSGSGSGTEFTLTISSLQPEDFATYYCLQHNSYPLTFGCGTKVEIK |
| 2351 | FL 7-A8 CC | artificial | EIQMTQSPSSLSASVGDRVTITCRASQGIRNDLGWYQQKPGKAPKRLIYAASTLQSGV |
| | EI GQ-VL | | PSRFSGSGSGTEFTLTISSLQPEDFATYYCLQHNSYPLTFGCGTKVEIK |
| 2352 | FL 7-A8 CC | artificial | QVTLKESGPTLVKPTETLTLTCTLSGFSLNNARMGVSWIRQPPGKCLEWLAHIFSNDE |
| | x I2Cx scFc | | KSYSTSLKNRLTISKDSSKTQVVLTMTNVDPVDTATYYCARIVGYGSGWYGFFDYWGQ |
| | -Full | | GTLVTVSSGGGGSGGGGSGGGGSDIQMTQSPSSLSASVGDRVTITCRASQGIRNDLGW |
| | Sequence | | YQQKPGKAPKRLIYAASTLQSGVPSRFSGSGSGTEFTLTISSLQPEDFATYYCLQHNS |
| | | | YPLTFGCGTKVEIKSGGGGSEVQLVESGGGLVQPGGSLKLSCAASGFTENKYAMNWVR |
| | | | QAPGKGLEWVARIRSKYNNYATYYADSVKDRFTISRDDSKNTAYLQMNNLKTEDTAVY |
| | | | YCVRHGNFGNSYISYWAYWGQGTLVTVSSGGGGSGGGGSGGGGSQTVVTQEPSLTVSP |
| | | | GGTVTLTCGSSTGAVTSGNYPNWVQQKPGQAPRGLIGGTKFLAPGTPARFSGSLLGGK |
| | | | AALTLSGVQPEDEAEYYCVLWYSNRWVFGGGTKLTVLGGGGDKTHTCPPCPAPELLGG |
| | | | PSVFLFPPKPKDTLMISRTPEVTCVVVDVSHEDPEVKFNWYVDGVEVHNAKTKPCEEQ |
| | | | YGSTYRCVSVLTVLHQDWLNGKEYKCKVSNKALPAPIEKTISKAKGQPREPQVYTLPP |
| | | | SREEMTKNQVSLTCLVKGFYPSDIAVEWESNGQPENNYKTTPPVLDSDGSFFLYSKLT |
| | | | VDKSRWQQGNVFSCSVMHEALHNHYTQKSLSLSPGKGGGGSGGGGSGGGGSGGGGSGG |
| | | | GGSGGGGSDKTHTCPPCPAPELLGGPSVFLFPPKPKDTLMISRTPEVTCVVVDVSHED |
| | | | PEVKFNWYVDGVEVHNAKTKPCEEQYGSTYRCVSVLTVLHQDWLNGKEYKCKVSNKAL |
| | | | PAPIEKTISKAKGQPREPQVYTLPPSREEMTKNQVSLTCLVKGFYPSDIAVEWESNGQ |
| | | | PENNYKTTPPVLDSDGSFFLYSKLTVDKSRWQQGNVFSCSVMHEALHNHYTQKSLSLS |
| | | | PGK |
| 2353 | FL 7-A8 CC | artificial | QVTLKESGPTLVKPTETLTLTCTLSGFSLNNARMGVSWIRQPPGKCLEWLAHIFSNDE |
| | x I2Ex scFc | | KSYSTSLKNRLTISKDSSKTQVVLTMTNVDPVDTATYYCARIVGYGSGWYGFFDYWGQ |
| | -Full | | GTLVTVSSGGGGSGGGGSGGGGSDIQMTQSPSSLSASVGDRVTITCRASQGIRNDLGW |
| | Sequence | | YQQKPGKAPKRLIYAASTLQSGVPSRFSGSGSGTEFTLTISSLQPEDFATYYCLQHNS |
| | | | YPLTFGCGTKVEIKSGGGGSEVQLVESGGGLVQPGGSLKLSCAASGFTENKYAINWVR |
| | | | QAPGKGLEWVARIRSKYNNYATYYADAVKDRFTISRDDSKNTVYLQMNNLKTEDTAVY |
| | | | YCARAGNFGSSYISYWAYWGQGTLVTVSSGGGGSGGGGSGGGGSQTVVTQEPSLTVSP |
| | | | GGTVTITCGSSTGAVTSGNYPNWVQKKPGQAPRGLIGGTKFLAPGTPARFSGSLSGGK |
| | | | AALTLSGVQPEDEAEYYCVLWYSNRWVFGSGTKLTVLGGGGDKTHTCPPCPAPELLGG |
| | | | PSVFLFPPKPKDTLMISRTPEVTCVVVDVSHEDPEVKFNWYVDGVEVHNAKTKPCEEQ |
| | | | YGSTYRCVSVLTVLHQDWLNGKEYKCKVSNKALPAPIEKTISKAKGQPREPQVYTLPP |
| | | | SREEMTKNQVSLTCLVKGFYPSDIAVEWESNGQPENNYKTTPPVLDSDGSFFLYSKLT |
| | | | VDKSRWQQGNVFSCSVMHEALHNHYTQKSLSLSPGKGGGGSGGGGSGGGGSGGGGSGG |
| | | | GGSGGGGSDKTHTCPPCPAPELLGGPSVFLFPPKPKDTLMISRTPEVTCVVVDVSHED |
| | | | PEVKFNWYVDGVEVHNAKTKPCEEQYGSTYRCVSVLTVLHQDWLNGKEYKCKVSNKAL |
| | | | PAPIEKTISKAKGQPREPQVYTLPPSREEMTKNQVSLTCLVKGFYPSDIAVEWESNGQ |
| | | | PENNYKTTPPVLDSDGSFFLYSKLTVDKSRWQQGNVFSCSVMHEALHNHYTQKSLSLS |
| | | | PGK |
| 2354 | FL 7-A8 CC | artificial | QVTLKESGPTLVKPTETLTLTCTLSGFSLNNARMGVSWIRQPPGKCLEWLAHIFSNDE |
| | x I2Kx scFc | | KSYSTSLKNRLTISKDSSKTQVVLTMTNVDPVDTATYYCARIVGYGSGWYGFFDYWGQ |
| | -Full | | GTLVTVSSGGGGSGGGGSGGGGSDIQMTQSPSSLSASVGDRVTITCRASQGIRNDLGW |
| | Sequence | | YQQKPGKAPKRLIYAASTLQSGVPSRFSGSGSGTEFTLTISSLQPEDFATYYCLQHNS |
| | | | YPLTFGCGTKVEIKSGGGGSEVQLVESGGGLVQPGGSLKLSCAASGFTENKYAMNWVR |
| | | | QAPGKGLEWVARIRSKYNNYATYYAEAVKGRFTISRDDSKNTVYLQMNNLKTEDTAVY |
| | | | YCVRNENIGTSYISYWAYWGQGTLVTVSSGGGGSGGGGSGGGGSQTVVTQEPSLTVSP |
| | | | GGTVTITCGSSTGAVTSGNYPNWVQQKPGQAPRGLIGGTKFLAPGTPARFSGSLSGGK |
| | | | AALTLSGVQPEDEAEYYCVLWYSNRWVFGSGTKLTVLGGGGDKTHTCPPCPAPELLGG |
| | | | PSVFLFPPKPKDTLMISRTPEVTCVVVDVSHEDPEVKENWYVDGVEVHNAKTKPCEEQ |
| | | | YGSTYRCVSVLTVLHQDWLNGKEYKCKVSNKALPAPIEKTISKAKGQPREPQVYTLPP |
| | | | SREEMTKNQVSLTCLVKGFYPSDIAVEWESNGQPENNYKTTPPVLDSDGSFFLYSKLT |
| | | | VDKSRWQQGNVFSCSVMHEALHNHYTQKSLSLSPGKGGGGSGGGGSGGGGSGGGGSGG |
| | | | GGSGGGGSDKTHTCPPCPAPELLGGPSVFLFPPKPKDTLMISRTPEVTCVVVDVSHED |
| | | | PEVKFNWYVDGVEVHNAKTKPCEEQYGSTYRCVSVLTVLHQDWLNGKEYKCKVSNKAL |
| | | | PAPIEKTISKAKGQPREPQVYTLPPSREEMTKNQVSLTCLVKGFYPSDIAVEWESNGQ |
| | | | PENNYKTTPPVLDSDGSFFLYSKLTVDKSRWQQGNVFSCSVMHEALHNHYTQKSLSLS |
| | | | PGK |
| 2355 | FL 7-A8 CC | artificial | QVTLKESGPTLVKPTETLTLTCTLSGFSLNNARMGVSWIRQPPGKCLEWLAHIFSNDE |
| | x I2Lx scFc | | KSYSTSLKNRLTISKDSSKTQVVLTMTNVDPVDTATYYCARIVGYGSGWYGFFDYWGQ |
| | -Full | | GTLVTVSSGGGGSGGGGSGGGGSDIQMTQSPSSLSASVGDRVTITCRASQGIRNDLGW |
| | Sequence | | YQQKPGKAPKRLIYAASTLQSGVPSRFSGSGSGTEFTLTISSLQPEDFATYYCLQHNS |
| | | | YPLTFGCGTKVEIKSGGGGSEVQLVESGGGLVQPGGSLKLSCAASGFTENKYAMNWVR |
| | | | QAPGKGMEWVARIRSKYNNYATYYADAVKDRFTISRDDSKNTLYLQMNNLKTEDTAVY |
| | | | YCVRAGNFGSSYISYFAYWGQGTLVTVSSGGGGSGGGGSGGGGSQTVVTQEPSLTVSP |
| | | | GGTVTITCGSSTGAVTSGNYPNWIQKKPGQAPRGLIGGTKFLAPGTPARFSGSLEGGK |
| | | | AALTLSGVQPEDEAEYYCVLYYSNRWVFGSGTKLTVLGGGGDKTHTCPPCPAPELLGG |
| | | | PSVFLFPPKPKDTLMISRTPEVTCVVVDVSHEDPEVKENWYVDGVEVHNAKTKPCEEQ |
| | | | YGSTYRCVSVLTVLHQDWLNGKEYKCKVSNKALPAPIEKTISKAKGQPREPQVYTLPP |
| | | | SREEMTKNQVSLTCLVKGFYPSDIAVEWESNGQPENNYKTTPPVLDSDGSFFLYSKLT |
| | | | VDKSRWQQGNVFSCSVMHEALHNHYTQKSLSLSPGKGGGGSGGGGSGGGGSGGGGSGG |
| | | | GGSGGGGSDKTHTCPPCPAPELLGGPSVFLFPPKPKDTLMISRTPEVTCVVVDVSHED |
| | | | PEVKFNWYVDGVEVHNAKTKPCEEQYGSTYRCVSVLTVLHQDWLNGKEYKCKVSNKAL |
| | | | PAPIEKTISKAKGQPREPQVYTLPPSREEMTKNQVSLTCLVKGFYPSDIAVEWESNGQ |
| | | | PENNYKTTPPVLDSDGSFFLYSKLTVDKSRWQQGNVFSCSVMHEALHNHYTQKSLSLS |
| | | | PGK |
| 2356 | FL 7-A8 CC | artificial | QVTLKESGPTLVKPTETLTLTCTLSGFSLNNARMGVSWIRQPPGKCLEWLAHIFSNDE |
| | x I2M2x | | KSYSTSLKNRLTISKDSSKTQVVLTMTNVDPVDTATYYCARIVGYGSGWYGFFDYWGQ |
| | ScFc-Full | | GTLVTVSSGGGGSGGGGSGGGGSDIQMTQSPSSLSASVGDRVTITCRASQGIRNDLGW |
| | Sequence | | YQQKPGKAPKRLIYAASTLQSGVPSRFSGSGSGTEFTLTISSLQPEDFATYYCLQHNS |
| | | | YPLTFGCGTKVEIKSGGGGSEVQLVESGGGLVQPGGSLKLSCAASGFTENKYAINWVR |
| | | | EAPGKGLEWVARIRSKYNNYATYYADAVKDRFTISRDDSKNTAYLQMNNLKTEDTAVY |
| | | | YCVRNANFGTSYISYFAYWGQGTLVTVSSGGGGSGGGGSGGGGSQTVVTQEPSLTVSP |
| | | | GGTVTLTCGSSTGAVTSGNYPNWVQKKPGQAPRGLIGGTKFLAPGTPARFSGSLLGGK |
| | | | AALTLSGVQPEDEAEYYCVLWYSNRWVFGSGTKLTVLGGGGDKTHTCPPCPAPELLGG |
| | | | PSVFLFPPKPKDTLMISRTPEVTCVVVDVSHEDPEVKENWYVDGVEVHNAKTKPCEEQ |
| | | | YGSTYRCVSVLTVLHQDWLNGKEYKCKVSNKALPAPIEKTISKAKGQPREPQVYTLPP |
| | | | SREEMTKNQVSLTCLVKGFYPSDIAVEWESNGQPENNYKTTPPVLDSDGSFFLYSKLT |
| | | | VDKSRWQQGNVFSCSVMHEALHNHYTQKSLSLSPGKGGGGSSGGGGGGGGSGGGGSGG |
| | | | GGSGGGGSDKTHTCPPCPAPELLGGPSVFLFPPKPKDTLMISRTPEVTCVVVDVSHED |
| | | | PEVKFNWYVDGVEVHNAKTKPCEEQYGSTYRCVSVLTVLHQDWLNGKEYKCKVSNKAL |
| | | | PAPIEKTISKAKGQPREPQVYTLPPSREEMTKNQVSLTCLVKGFYPSDIAVEWESNGQ |
| | | | PENNYKTTPPVLDSDGSFFLYSKLTVDKSRWQQGNVFSCSVMHEALHNHYTQKSLSLS |
| | | | PGK |
| 2357 | FL 7-A8 CC | artificial | QVTLKESGPTLVKPTETLTLTCTLSGFSLNNARMGVSWIRQPPGKCLEWLAHIFSNDE |
| | x I2Mx scFc | | KSYSTSLKNRLTISKDSSKTQVVLTMTNVDPVDTATYYCARIVGYGSGWYGFFDYWGQ |
| | -Full | | GTLVTVSSGGGGSGGGGSGGGGSDIQMTQSPSSLSASVGDRVTITCRASQGIRNDLGW |
| | Sequence | | YQQKPGKAPKRLIYAASTLQSGVPSRFSGSGSGTEFTLTISSLQPEDFATYYCLQHNS |
| | | | YPLTFGCGTKVEIKSGGGGSEVQLVESGGGLVQPGGSLKLSCAASGFTENKYAMNWVR |
| | | | QAPGKGMEWVARIRSKYNNYATYYADAVKDRFTISRDDSKNTLYLQMNNLKTEDTAVY |
| | | | YCVRAGNFGTSYISYWAYWGQGTLVTVSSGGGGSGGGGSGGGGSQTVVTQEPSLTVSP |
| | | | GGTVTITCGSSTGAVTSGNYPNWVQKKPGQAPRGLIGGTKFLAPGTPARFSGSLSGGK |
| | | | AALTLSGVQPEDEAEYYCVLWYSNRWVFGSGTKLTVLGGGGDKTHTCPPCPAPELLGG |
| | | | PSVFLFPPKPKDTLMISRTPEVTCVVVDVSHEDPEVKENWYVDGVEVHNAKTKPCEEQ |
| | | | YGSTYRCVSVLTVLHQDWLNGKEYKCKVSNKALPAPIEKTISKAKGQPREPQVYTLPP |
| | | | SREEMTKNQVSLTCLVKGFYPSDIAVEWESNGQPENNYKTTPPVLDSDGSFFLYSKLT |
| | | | VDKSRWQQGNVFSCSVMHEALHNHYTQKSLSLSPGKGGGGSGGGGSGGGGSGGGGSGG |
| | | | GGSGGGGSDKTHTCPPCPAPELLGGPSVFLFPPKPKDTLMISRTPEVTCVVVDVSHED |
| | | | PEVKFNWYVDGVEVHNAKTKPCEEQYGSTYRCVSVLTVLHQDWLNGKEYKCKVSNKAL |
| | | | PAPIEKTISKAKGQPREPQVYTLPPSREEMTKNQVSLTCLVKGFYPSDIAVEWESNGQ |
| | | | PENNYKTTPPVLDSDGSFFLYSKLTVDKSRWQQGNVFSCSVMHEALHNHYTQKSLSLS |
| | | | PGK |
| 2358 | MA 10-B5 CC | artificial | NAWMS |
| | -HCDR1 | | |
| 2359 | MA 10-B5 CC | artificial | RIRSRSYGGTTDYAAPVKG |
| | -HCDR2 | | |
| 2360 | MA 10-B5 CC | artificial | PSYSGSYYNYFSVMDV |
| | HCDR3 | | |
| 2361 | MA 10-B5 CC | artificial | RTSQSISSYLN |
| | LCDR1 | | |
| 2362 | MA 10-B5 CC | artificial | AASSLQG |
| | -LCDR2 | | |
| 2363 | MA 10-B5 CC | artificial | QQTYSMPFT |
| | -LCDR3 | | |
| 2364 | MA 10-B5 CC | artificial | EVQLVESGGGLVQPGGSLRLSCAASGFTFSNAWMSWVRQAPGKCLEWVGRIRSRSYGG |
| | -VH | | TTDYAAPVKGRFTISRDDSKNTLFLQMNSLKTEDTAVYYCTTPSYSGSYYNYFSVMDV |
| | | | WGQGTTVTVSS |
| 2365 | MA 10-B5 CC | artificial | DIQMTQSPSSLSASVGDRVTITCRTSQSISSYLNWYQQKPGRAPKLLIFAASSLQGGV |
| | -VL | | PSRFSGSGSGTDFTLTISSLQPEDFATYYCQQTYSMPFTFGCGTKVEIK |
| 2366 | MA 10-B5 CC | artificial | EIQMTQSPSSLSASVGDRVTITCRTSQSISSYLNWYQQKPGRAPKLLIFAASSLQGGV |
| | EI GQ-VL | | PSRFSGSGSGTDFTLTISSLQPEDFATYYCQQTYSMPFTFGCGTKVEIK |
| 2367 | MA 10-B5 CC | artificial | EVQLVESGGGLVQPGGSLRLSCAASGFTFSNAWMSWVRQAPGKCLEWVGRIRSRSYGG |
| | x I2C x | | TTDYAAPVKGRFTISRDDSKNTLFLQMNSLKTEDTAVYYCTTPSYSGSYYNYFSVMDV |
| | scFc-Full | | WGQGTTVTVSSGGGGSGGGGSGGGGSDIQMTQSPSSLSASVGDRVTITCRTSQSISSY |
| | Sequence | | LNWYQQKPGRAPKLLIFAASSLQGGVPSRFSGSGSGTDFTLTISSLQPEDFATYYCQQ |
| | | | TYSMPFTFGCGTKVEIKSGGGGSEVQLVESGGGLVQPGGSLKLSCAASGFTFNKYAMN |
| | | | WVRQAPGKGLEWVARIRSKYNNYATYYADSVKDRFTISRDDSKNTAYLQMNNLKTEDT |
| | | | AVYYCVRHGNFGNSYISYWAYWGQGTLVTVSSGGGGSGGGGSGGGGSQTVVTQEPSLT |
| | | | VSPGGTVTLTCGSSTGAVTSGNYPNWVQQKPGQAPRGLIGGTKFLAPGTPARFSGSLL |
| | | | GGKAALTLSGVQPEDEAEYYCVLWYSNRWVFGGGTKLTVLGGGGDKTHTCPPCPAPEL |
| | | | LGGPSVFLFPPKPKDTLMISRTPEVTCVVVDVSHEDPEVKENWYVDGVEVHNAKTKPC |
| | | | EEQYGSTYRCVSVLTVLHQDWLNGKEYKCKVSNKALPAPIEKTISKAKGQPREPQVYT |
| | | | LPPSREEMTKNQVSLTCLVKGFYPSDIAVEWESNGQPENNYKTTPPVLDSDGSFFLYS |
| | | | KLTVDKSRWQQGNVFSCSVMHEALHNHYTQKSLSLSPGKGGGGSGGGGSGGGGSGGGG |
| | | | SGGGGSGGGGSDKTHTCPPCPAPELLGGPSVFLFPPKPKDTLMISRTPEVTCVVVDVS |
| | | | HEDPEVKFNWYVDGVEVHNAKTKPCEEQYGSTYRCVSVLTVLHQDWLNGKEYKCKVSN |
| | | | KALPAPIEKTISKAKGQPREPQVYTLPPSREEMTKNQVSLTCLVKGFYPSDIAVEWES |
| | | | NGQPENNYKTTPPVLDSDGSFFLYSKLTVDKSRWQQGNVFSCSVMHEALHNHYTQKSL |
| | | | SLSPGK |
| 2368 | MA 10-B5 CC | artificial | EVQLVESGGGLVQPGGSLRLSCAASGFTFSNAWMSWVRQAPGKCLEWVGRIRSRSYGG |
| | x I2E x | | TTDYAAPVKGRFTISRDDSKNTLFLQMNSLKTEDTAVYYCTTPSYSGSYYNYFSVMDV |
| | scFc-Full | | WGQGTTVTVSSGGGGSGGGGSGGGGSDIQMTQSPSSLSASVGDRVTITCRTSQSISSY |
| | Sequence | | LNWYQQKPGRAPKLLIFAASSLQGGVPSRFSGSGSGTDFTLTISSLQPEDFATYYCQQ |
| | | | TYSMPFTFGCGTKVEIKSGGGGSEVQLVESGGGLVQPGGSLKLSCAASGFTENKYAIN |
| | | | WVRQAPGKGLEWVARIRSKYNNYATYYADAVKDRFTISRDDSKNTVYLQMNNLKTEDT |
| | | | AVYYCARAGNFGSSYISYWAYWGQGTLVTVSSGGGGSGGGGSGGGGSQTVVTQEPSLT |
| | | | VSPGGTVTITCGSSTGAVTSGNYPNWVQKKPGQAPRGLIGGTKFLAPGTPARFSGSLS |
| | | | GGKAALTLSGVQPEDEAEYYCVLWYSNRWVFGSGTKLTVLGGGGDKTHTCPPCPAPEL |
| | | | LGGPSVFLFPPKPKDTLMISRTPEVTCVVVDVSHEDPEVKENWYVDGVEVHNAKTKPC |
| | | | EEQYGSTYRCVSVLTVLHQDWLNGKEYKCKVSNKALPAPIEKTISKAKGQPREPQVYT |
| | | | LPPSREEMTKNQVSLTCLVKGFYPSDIAVEWESNGQPENNYKTTPPVLDSDGSFFLYS |
| | | | KLTVDKSRWQQGNVFSCSVMHEALHNHYTQKSLSLSPGKGGGGSGGGGSGGGGSGGGG |
| | | | SGGGGSGGGGSDKTHTCPPCPAPELLGGPSVFLFPPKPKDTLMISRTPEVTCVVVDVS |
| | | | HEDPEVKFNWYVDGVEVHNAKTKPCEEQYGSTYRCVSVLTVLHQDWLNGKEYKCKVSN |
| | | | KALPAPIEKTISKAKGQPREPQVYTLPPSREEMTKNQVSLTCLVKGFYPSDIAVEWES |
| | | | NGQPENNYKTTPPVLDSDGSFFLYSKLTVDKSRWQQGNVFSCSVMHEALHNHYTQKSL |
| | | | SLSPGK |
| 2369 | MA 10-B5 CC | artificial | EVQLVESGGGLVQPGGSLRLSCAASGFTFSNAWMSWVRQAPGKCLEWVGRIRSRSYGG |
| | x I2K x | | TTDYAAPVKGRFTISRDDSKNTLFLQMNSLKTEDTAVYYCTTPSYSGSYYNYFSVMDV |
| | scFc-Full | | WGQGTTVTVSSGGGGSGGGGSGGGGSDIQMTQSPSSLSASVGDRVTITCRTSQSISSY |
| | Sequence | | LNWYQQKPGRAPKLLIFAASSLQGGVPSRFSGSGSGTDFTLTISSLQPEDFATYYCQQ |
| | | | TYSMPFTFGCGTKVEIKSGGGGSEVQLVESGGGLVQPGGSLKLSCAASGFTENKYAMN |
| | | | WVRQAPGKGLEWVARIRSKYNNYATYYAEAVKGRFTISRDDSKNTVYLQMNNLKTEDT |
| | | | AVYYCVRNENIGTSYISYWAYWGQGTLVTVSSGGGGSGGGGSGGGGSQTVVTQEPSLT |
| | | | VSPGGTVTITCGSSTGAVTSGNYPNWVQQKPGQAPRGLIGGTKFLAPGTPARFSGSLS |
| | | | GGKAALTLSGVQPEDEAEYYCVLWYSNRWVFGSGTKLTVLGGGGDKTHTCPPCPAPEL |
| | | | LGGPSVFLFPPKPKDTLMISRTPEVTCVVVDVSHEDPEVKFNWYVDGVEVHNAKTKPC |
| | | | EEQYGSTYRCVSVLTVLHQDWLNGKEYKCKVSNKALPAPIEKTISKAKGQPREPQVYT |
| | | | LPPSREEMTKNQVSLTCLVKGFYPSDIAVEWESNGQPENNYKTTPPVLDSDGSFFLYS |
| | | | KLTVDKSRWQQGNVFSCSVMHEALHNHYTQKSLSLSPGKGGGGSGGGGSGGGGSGGGG |
| | | | SGGGGSGGGGSDKTHTCPPCPAPELLGGPSVFLFPPKPKDTLMISRTPEVTCVVVDVS |
| | | | HEDPEVKFNWYVDGVEVHNAKTKPCEEQYGSTYRCVSVLTVLHQDWLNGKEYKCKVSN |
| | | | KALPAPIEKTISKAKGQPREPQVYTLPPSREEMTKNQVSLTCLVKGFYPSDIAVEWES |
| | | | NGQPENNYKTTPPVLDSDGSFFLYSKLTVDKSRWQQGNVFSCSVMHEALHNHYTQKSL |
| | | | SLSPGK |
| 2370 | MA 10-B5 CC | artificial | EVQLVESGGGLVQPGGSLRLSCAASGFTFSNAWMSWVRQAPGKCLEWVGRIRSRSYGG |
| | x I2L x | | TTDYAAPVKGRFTISRDDSKNTLFLQMNSLKTEDTAVYYCTTPSYSGSYYNYFSVMDV |
| | scFc-Full | | WGQGTTVTVSSGGGGSGGGGSGGGGSDIQMTQSPSSLSASVGDRVTITCRTSQSISSY |
| | Sequence | | LNWYQQKPGRAPKLLIFAASSLQGGVPSRFSGSGSGTDFTLTISSLQPEDFATYYCQQ |
| | | | TYSMPFTFGCGTKVEIKSGGGGSEVQLVESGGGLVQPGGSLKLSCAASGFTENKYAMN |
| | | | WVRQAPGKGMEWVARIRSKYNNYATYYADAVKDRFTISRDDSKNTLYLQMNNLKTEDT |
| | | | AVYYCVRAGNFGSSYISYFAYWGQGTLVTVSSGGGGSGGGGSGGGGSQTVVTQEPSLT |
| | | | VSPGGTVTITCGSSTGAVTSGNYPNWIQKKPGQAPRGLIGGTKFLAPGTPARFSGSLE |
| | | | GGKAALTLSGVQPEDEAEYYCVLYYSNRWVFGSGTKLTVLGGGGDKTHTCPPCPAPEL |
| | | | LGGPSVFLFPPKPKDTLMISRTPEVTCVVVDVSHEDPEVKFNWYVDGVEVHNAKTKPC |
| | | | EEQYGSTYRCVSVLTVLHQDWLNGKEYKCKVSNKALPAPIEKTISKAKGQPREPQVYT |
| | | | LPPSREEMTKNQVSLTCLVKGFYPSDIAVEWESNGQPENNYKTTPPVLDSDGSFFLYS |
| | | | KLTVDKSRWQQGNVFSCSVMHEALHNHYTQKSLSLSPGKGGGGSGGGGSGGGGSGGGG |
| | | | SGGGGSGGGGSDKTHTCPPCPAPELLGGPSVFLFPPKPKDTLMISRTPEVTCVVVDVS |
| | | | HEDPEVKFNWYVDGVEVHNAKTKPCEEQYGSTYRCVSVLTVLHQDWLNGKEYKCKVSN |
| | | | KALPAPIEKTISKAKGQPREPQVYTLPPSREEMTKNQVSLTCLVKGFYPSDIAVEWES |
| | | | NGQPENNYKTTPPVLDSDGSFFLYSKLTVDKSRWQQGNVFSCSVMHEALHNHYTQKSL |
| | | | SLSPGK |
| 2371 | MA 10-B5 CC | artificial | EVQLVESGGGLVQPGGSLRLSCAASGFTFSNAWMSWVRQAPGKCLEWVGRIRSRSYGG |
| | x I2M x | | TTDYAAPVKGRFTISRDDSKNTLFLQMNSLKTEDTAVYYCTTPSYSGSYYNYFSVMDV |
| | scFc-Full | | WGQGTTVTVSSGGGGSGGGGSGGGGSDIQMTQSPSSLSASVGDRVTITCRTSQSISSY |
| | Sequence | | LNWYQQKPGRAPKLLIFAASSLQGGVPSRFSGSGSGTDFTLTISSLQPEDFATYYCQQ |
| | | | TYSMPFTFGCGTKVEIKSGGGGSEVQLVESGGGLVQPGGSLKLSCAASGFTENKYAMN |
| | | | WVRQAPGKGMEWVARIRSKYNNYATYYADAVKDRFTISRDDSKNTLYLQMNNLKTEDT |
| | | | AVYYCVRAGNFGTSYISYWAYWGQGTLVTVSSGGGGSGGGGSGGGGSQTVVTQEPSLT |
| | | | VSPGGTVTITCGSSTGAVTSGNYPNWVQKKPGQAPRGLIGGTKFLAPGTPARFSGSLS |
| | | | GGKAALTLSGVQPEDEAEYYCVLWYSNRWVFGSGTKLTVLGGGGDKTHTCPPCPAPEL |
| | | | LGGPSVFLFPPKPKDTLMISRTPEVTCVVVDVSHEDPEVKENWYVDGVEVHNAKTKPC |
| | | | EEQYGSTYRCVSVLTVLHQDWLNGKEYKCKVSNKALPAPIEKTISKAKGQPREPQVYT |
| | | | LPPSREEMTKNQVSLTCLVKGFYPSDIAVEWESNGQPENNYKTTPPVLDSDGSFFLYS |
| | | | KLTVDKSRWQQGNVFSCSVMHEALHNHYTQKSLSLSPGKGGGGSGGGGSGGGGSGGGG |
| | | | SGGGGSGGGGSDKTHTCPPCPAPELLGGPSVFLFPPKPKDTLMISRTPEVTCVVVDVS |
| | | | HEDPEVKFNWYVDGVEVHNAKTKPCEEQYGSTYRCVSVLTVLHQDWLNGKEYKCKVSN |
| | | | KALPAPIEKTISKAKGQPREPQVYTLPPSREEMTKNQVSLTCLVKGFYPSDIAVEWES |
| | | | NGQPENNYKTTPPVLDSDGSFFLYSKLTVDKSRWQQGNVFSCSVMHEALHNHYTQKSL |
| | | | SLSPGK |
| 2372 | MA 10-B5 CC | artificial | EVQLVESGGGLVQPGGSLRLSCAASGFTFSNAWMSWVRQAPGKCLEWVGRIRSRSYGG |
| | x I2M2 x | | TTDYAAPVKGRFTISRDDSKNTLFLQMNSLKTEDTAVYYCTTPSYSGSYYNYFSVMDV |
| | ScFc-Full | | WGQGTTVTVSSGGGGSGGGGSGGGGSDIQMTQSPSSLSASVGDRVTITCRTSQSISSY |
| | Sequence | | LNWYQQKPGRAPKLLIFAASSLQGGVPSRFSGSGSGTDFTLTISSLQPEDFATYYCQQ |
| | | | TYSMPFTFGCGTKVEIKSGGGGSEVQLVESGGGLVQPGGSLKLSCAASGFTFNKYAIN |
| | | | WVREAPGKGLEWVARIRSKYNNYATYYADAVKDRFTISRDDSKNTAYLQMNNLKTEDT |
| | | | AVYYCVRNANFGTSYISYFAYWGQGTLVTVSSGGGGSGGGGSGGGGSQTVVTQEPSLT |
| | | | VSPGGTVTLTCGSSTGAVTSGNYPNWVQKKPGQAPRGLIGGTKFLAPGTPARFSGSLL |
| | | | GGKAALTLSGVQPEDEAEYYCVLWYSNRWVFGSGTKLTVLGGGGDKTHTCPPCPAPEL |
| | | | LGGPSVFLFPPKPKDTLMISRTPEVTCVVVDVSHEDPEVKENWYVDGVEVHNAKTKPC |
| | | | EEQYGSTYRCVSVLTVLHQDWLNGKEYKCKVSNKALPAPIEKTISKAKGQPREPQVYT |
| | | | LPPSREEMTKNQVSLTCLVKGFYPSDIAVEWESNGQPENNYKTTPPVLDSDGSFFLYS |
| | | | KLTVDKSRWQQGNVFSCSVMHEALHNHYTQKSLSLSPGKGGGGSGGGGSGGGGSGGGG |
| | | | SGGGGSGGGGSDKTHTCPPCPAPELLGGPSVFLFPPKPKDTLMISRTPEVTCVVVDVS |
| | | | HEDPEVKFNWYVDGVEVHNAKTKPCEEQYGSTYRCVSVLTVLHQDWLNGKEYKCKVSN |
| | | | KALPAPIEKTISKAKGQPREPQVYTLPPSREEMTKNQVSLTCLVKGFYPSDIAVEWES |
| | | | NGQPENNYKTTPPVLDSDGSFFLYSKLTVDKSRWQQGNVFSCSVMHEALHNHYTQKSL |
| | | | SLSPGK |
| 2373 | MA A103 CC | artificial | QVTLKESGPGILQPSQTLSLTCSFSGFSLNTSGMNVGWIRQPSGKCLDWLAHIWWNDD |
| | x I2C x | | KYYNPALKSRLTISKDTSNNQVFLKIASVVTADTATYYCVRSYFGDYVWYFDVWGAGT |
| | scFc-Full | | TVTVSSGGGGSGGGGSGGGGSDIQMTQTTSSLSASLGDRVTISCSASQGIHNYLNWYQ |
| | Sequence | | QKPDGTVKLLIYYTSSLHSGVPSRFSGSGSGTDYSLTISNLEPEDIATYFCQQYSKLP |
| | | | RTFGCGTKLEIKSGGGGSEVQLVESGGGLVQPGGSLKLSCAASGFTFNKYAMNWVRQA |
| | | | PGKGLEWVARIRSKYNNYATYYADSVKDRFTISRDDSKNTAYLQMNNLKTEDTAVYYC |
| | | | VRHGNFGNSYISYWAYWGQGTLVTVSSGGGGSGGGGSGGGGSQTVVTQEPSLTVSPGG |
| | | | TVTLTCGSSTGAVTSGNYPNWVQQKPGQAPRGLIGGTKFLAPGTPARFSGSLLGGKAA |
| | | | LTLSGVQPEDEAEYYCVLWYSNRWVFGGGTKLTVLGGGGDKTHTCPPCPAPELLGGPS |
| | | | VFLFPPKPKDTLMISRTPEVTCVVVDVSHEDPEVKENWYVDGVEVHNAKTKPCEEQYG |
| | | | STYRCVSVLTVLHQDWLNGKEYKCKVSNKALPAPIEKTISKAKGQPREPQVYTLPPSR |
| | | | EEMTKNQVSLTCLVKGFYPSDIAVEWESNGQPENNYKTTPPVLDSDGSFFLYSKLTVD |
| | | | KSRWQQGNVFSCSVMHEALHNHYTQKSLSLSPGKGGGGSGGGGSGGGGSGGGGSGGGG |
| | | | SGGGGSDKTHTCPPCPAPELLGGPSVFLFPPKPKDTLMISRTPEVTCVVVDVSHEDPE |
| | | | VKFNWYVDGVEVHNAKTKPCEEQYGSTYRCVSVLTVLHQDWLNGKEYKCKVSNKALPA |
| | | | PIEKTISKAKGQPREPQVYTLPPSREEMTKNQVSLTCLVKGFYPSDIAVEWESNGQPE |
| | | | NNYKTTPPVLDSDGSFFLYSKLTVDKSRWQQGNVFSCSVMHEALHNHYTQKSLSLSPG |
| | | | K |
| 2374 | MA A103 CC | artificial | QVTLKESGPGILQPSQTLSLTCSFSGFSLNTSGMNVGWIRQPSGKCLDWLAHIWWNDD |
| | x I2E x | | KYYNPALKSRLTISKDTSNNQVFLKIASVVTADTATYYCVRSYFGDYVWYFDVWGAGT |
| | scFc-Full | | TVTVSSGGGGSGGGGSGGGGSDIQMTQTTSSLSASLGDRVTISCSASQGIHNYLNWYQ |
| | Sequence | | QKPDGTVKLLIYYTSSLHSGVPSRFSGSGSGTDYSLTISNLEPEDIATYFCQQYSKLP |
| | | | RTFGCGTKLEIKSGGGGSEVQLVESGGGLVQPGGSLKLSCAASGFTENKYAINWVRQA |
| | | | PGKGLEWVARIRSKYNNYATYYADAVKDRFTISRDDSKNTVYLQMNNLKTEDTAVYYC |
| | | | ARAGNFGSSYISYWAYWGQGTLVTVSSGGGGSGGGGSGGGGSQTVVTQEPSLTVSPGG |
| | | | TVTITCGSSTGAVTSGNYPNWVQKKPGQAPRGLIGGTKFLAPGTPARFSGSLSGGKAA |
| | | | LTLSGVQPEDEAEYYCVLWYSNRWVFGSGTKLTVLGGGGDKTHTCPPCPAPELLGGPS |
| | | | VFLFPPKPKDTLMISRTPEVTCVVVDVSHEDPEVKENWYVDGVEVHNAKTKPCEEQYG |
| | | | STYRCVSVLTVLHQDWLNGKEYKCKVSNKALPAPIEKTISKAKGQPREPQVYTLPPSR |
| | | | EEMTKNQVSLTCLVKGFYPSDIAVEWESNGQPENNYKTTPPVLDSDGSFFLYSKLTVD |
| | | | KSRWQQGNVFSCSVMHEALHNHYTQKSLSLSPGKGGGGSGGGGSGGGGSGGGGSGGGG |
| | | | SGGGGSDKTHTCPPCPAPELLGGPSVFLFPPKPKDTLMISRTPEVTCVVVDVSHEDPE |
| | | | VKFNWYVDGVEVHNAKTKPCEEQYGSTYRCVSVLTVLHQDWLNGKEYKCKVSNKALPA |
| | | | PIEKTISKAKGQPREPQVYTLPPSREEMTKNQVSLTCLVKGFYPSDIAVEWESNGQPE |
| | | | NNYKTTPPVLDSDGSFFLYSKLTVDKSRWQQGNVFSCSVMHEALHNHYTQKSLSLSPG |
| | | | K |
| 2375 | MA A103 CC | artificial | QVTLKESGPGILQPSQTLSLTCSFSGFSLNTSGMNVGWIRQPSGKCLDWLAHIWWNDD |
| | x I2K x | | KYYNPALKSRLTISKDTSNNQVFLKIASVVTADTATYYCVRSYFGDYVWYFDVWGAGT |
| | scFc-Full | | TVTVSSGGGGSGGGGSGGGGSDIQMTQTTSSLSASLGDRVTISCSASQGIHNYLNWYQ |
| | Sequence | | QKPDGTVKLLIYYTSSLHSGVPSRFSGSGSGTDYSLTISNLEPEDIATYFCQQYSKLP |
| | | | RTFGCGTKLEIKSGGGGSEVQLVESGGGLVQPGGSLKLSCAASGFTFNKYAMNWVRQA |
| | | | PGKGLEWVARIRSKYNNYATYYAEAVKGRFTISRDDSKNTVYLQMNNLKTEDTAVYYC |
| | | | VRNENIGTSYISYWAYWGQGTLVTVSSGGGGSGGGGSGGGGSQTVVTQEPSLTVSPGG |
| | | | TVTITCGSSTGAVTSGNYPNWVQQKPGQAPRGLIGGTKFLAPGTPARFSGSLSGGKAA |
| | | | LTLSGVQPEDEAEYYCVLWYSNRWVFGSGTKLTVLGGGGDKTHTCPPCPAPELLGGPS |
| | | | VFLFPPKPKDTLMISRTPEVTCVVVDVSHEDPEVKENWYVDGVEVHNAKTKPCEEQYG |
| | | | STYRCVSVLTVLHQDWLNGKEYKCKVSNKALPAPIEKTISKAKGQPREPQVYTLPPSR |
| | | | EEMTKNQVSLTCLVKGFYPSDIAVEWESNGQPENNYKTTPPVLDSDGSFFLYSKLTVD |
| | | | KSRWQQGNVFSCSVMHEALHNHYTQKSLSLSPGKGGGGSGGGGSGGGGSGGGGSGGGG |
| | | | SGGGGSDKTHTCPPCPAPELLGGPSVFLFPPKPKDTLMISRTPEVTCVVVDVSHEDPE |
| | | | VKFNWYVDGVEVHNAKTKPCEEQYGSTYRCVSVLTVLHQDWLNGKEYKCKVSNKALPA |
| | | | PIEKTISKAKGQPREPQVYTLPPSREEMTKNQVSLTCLVKGFYPSDIAVEWESNGQPE |
| | | | NNYKTTPPVLDSDGSFFLYSKLTVDKSRWQQGNVFSCSVMHEALHNHYTQKSLSLSPG |
| | | | K |
| 2376 | MA A103 CC | artificial | QVTLKESGPGILQPSQTLSLTCSFSGFSLNTSGMNVGWIRQPSGKCLDWLAHIWWNDD |
| | x I2L x | | KYYNPALKSRLTISKDTSNNQVFLKIASVVTADTATYYCVRSYFGDYVWYFDVWGAGT |
| | scFc-Full | | TVTVSSGGGGSGGGGSGGGGSDIQMTQTTSSLSASLGDRVTISCSASQGIHNYLNWYQ |
| | Sequence | | QKPDGTVKLLIYYTSSLHSGVPSRFSGSGSGTDYSLTISNLEPEDIATYFCQQYSKLP |
| | | | RTFGCGTKLEIKSGGGGSEVQLVESGGGLVQPGGSLKLSCAASGFTFNKYAMNWVRQA |
| | | | PGKGMEWVARIRSKYNNYATYYADAVKDRFTISRDDSKNTLYLQMNNLKTEDTAVYYC |
| | | | VRAGNFGSSYISYFAYWGQGTLVTVSSGGGGSGGGGSGGGGSQTVVTQEPSLTVSPGG |
| | | | TVTITCGSSTGAVTSGNYPNWIQKKPGQAPRGLIGGTKFLAPGTPARFSGSLEGGKAA |
| | | | LTLSGVQPEDEAEYYCVLYYSNRWVFGSGTKLTVLGGGGDKTHTCPPCPAPELLGGPS |
| | | | VFLFPPKPKDTLMISRTPEVTCVVVDVSHEDPEVKENWYVDGVEVHNAKTKPCEEQYG |
| | | | STYRCVSVLTVLHQDWLNGKEYKCKVSNKALPAPIEKTISKAKGQPREPQVYTLPPSR |
| | | | EEMTKNQVSLTCLVKGFYPSDIAVEWESNGQPENNYKTTPPVLDSDGSFFLYSKLTVD |
| | | | KSRWQQGNVFSCSVMHEALHNHYTQKSLSLSPGKGGGGSGGGGSGGGGSGGGGSGGGG |
| | | | SGGGGSDKTHTCPPCPAPELLGGPSVFLFPPKPKDTLMISRTPEVTCVVVDVSHEDPE |
| | | | VKFNWYVDGVEVHNAKTKPCEEQYGSTYRCVSVLTVLHQDWLNGKEYKCKVSNKALPA |
| | | | PIEKTISKAKGQPREPQVYTLPPSREEMTKNQVSLTCLVKGFYPSDIAVEWESNGQPE |
| | | | NNYKTTPPVLDSDGSFFLYSKLTVDKSRWQQGNVFSCSVMHEALHNHYTQKSLSLSPG |
| | | | K |
| 2377 | MA A103 CC | artificial | QVTLKESGPGILQPSQTLSLTCSFSGFSLNTSGMNVGWIRQPSGKCLDWLAHIWWNDD |
| | x I2M x | | KYYNPALKSRLTISKDTSNNQVFLKIASVVTADTATYYCVRSYFGDYVWYFDVWGAGT |
| | scFc-Full | | TVTVSSGGGGSGGGGSGGGGSDIQMTQTTSSLSASLGDRVTISCSASQGIHNYLNWYQ |
| | Sequence | | QKPDGTVKLLIYYTSSLHSGVPSRFSGSGSGTDYSLTISNLEPEDIATYFCQQYSKLP |
| | | | RTFGCGTKLEIKSGGGGSEVQLVESGGGLVQPGGSLKLSCAASGFTFNKYAMNWVRQA |
| | | | PGKGMEWVARIRSKYNNYATYYADAVKDRFTISRDDSKNTLYLQMNNLKTEDTAVYYC |
| | | | VRAGNFGTSYISYWAYWGQGTLVTVSSGGGGSGGGGSGGGGSQTVVTQEPSLTVSPGG |
| | | | TVTITCGSSTGAVTSGNYPNWVQKKPGQAPRGLIGGTKFLAPGTPARFSGSLSGGKAA |
| | | | LTLSGVQPEDEAEYYCVLWYSNRWVFGSGTKLTVLGGGGDKTHTCPPCPAPELLGGPS |
| | | | VFLFPPKPKDTLMISRTPEVTCVVVDVSHEDPEVKENWYVDGVEVHNAKTKPCEEQYG |
| | | | STYRCVSVLTVLHQDWLNGKEYKCKVSNKALPAPIEKTISKAKGQPREPQVYTLPPSR |
| | | | EEMTKNQVSLTCLVKGFYPSDIAVEWESNGQPENNYKTTPPVLDSDGSFFLYSKLTVD |
| | | | KSRWQQGNVFSCSVMHEALHNHYTQKSLSLSPGKGGGGSGGGGSGGGGSGGGGSGGGG |
| | | | SGGGGSDKTHTCPPCPAPELLGGPSVFLFPPKPKDTLMISRTPEVTCVVVDVSHEDPE |
| | | | VKFNWYVDGVEVHNAKTKPCEEQYGSTYRCVSVLTVLHQDWLNGKEYKCKVSNKALPA |
| | | | PIEKTISKAKGQPREPQVYTLPPSREEMTKNQVSLTCLVKGFYPSDIAVEWESNGQPE |
| | | | NNYKTTPPVLDSDGSFFLYSKLTVDKSRWQQGNVFSCSVMHEALHNHYTQKSLSLSPG |
| | | | K |
| | | | QVTLKESGPGILQPSQTLSLTCSFSGFSLNTSGMNVGWIRQPSGKCLDWLAHIWWNDD |
| 2378 | MA A103 CC | artificial | KYYNPALKSRLTISKDTSNNQVFLKIASVVTADTATYYCVRSYFGDYVWYFDVWGAGT |
| | x I2M2 x | | TVTVSSGGGGSGGGGSGGGGSDIQMTQTTSSLSASLGDRVTISCSASQGIHNYLNWYQ |
| | scFc-Full | | QKPDGTVKLLIYYTSSLHSGVPSRFSGSGSGTDYSLTISNLEPEDIATYFCQQYSKLP |
| | Sequence | | RTFGCGTKLEIKSGGGGSEVQLVESGGGLVQPGGSLKLSCAASGFTENKYAINWVREA |
| | | | PGKGLEWVARIRSKYNNYATYYADAVKDRFTISRDDSKNTAYLQMNNLKTEDTAVYYC |
| | | | VRNANFGTSYISYFAYWGQGTLVTVSSGGGGSGGGGSGGGGSQTVVTQEPSLTVSPGG |
| | | | TVTLTCGSSTGAVTSGNYPNWVQKKPGQAPRGLIGGTKFLAPGTPARFSGSLLGGKAA |
| | | | LTLSGVQPEDEAEYYCVLWYSNRWVFGSGTKLTVLGGGGDKTHTCPPCPAPELLGGPS |
| | | | VFLFPPKPKDTLMISRTPEVTCVVVDVSHEDPEVKENWYVDGVEVHNAKTKPCEEQYG |
| | | | STYRCVSVLTVLHQDWLNGKEYKCKVSNKALPAPIEKTISKAKGQPREPQVYTLPPSR |
| | | | EEMTKNQVSLTCLVKGFYPSDIAVEWESNGQPENNYKTTPPVLDSDGSFFLYSKLTVD |
| | | | KSRWQQGNVFSCSVMHEALHNHYTQKSLSLSPGKGGGGSGGGGSGGGGSGGGGSGGGG |
| | | | SGGGGSDKTHTCPPCPAPELLGGPSVFLFPPKPKDTLMISRTPEVTCVVVDVSHEDPE |
| | | | VKFNWYVDGVEVHNAKTKPCEEQYGSTYRCVSVLTVLHQDWLNGKEYKCKVSNKALPA |
| | | | PIEKTISKAKGQPREPQVYTLPPSREEMTKNQVSLTCLVKGFYPSDIAVEWESNGQPE |
| | | | NNYKTTPPVLDSDGSFFLYSKLTVDKSRWQQGNVFSCSVMHEALHNHYTQKSLSLSPG |
| | | | K |
| 2379 | MART A103 | artificial | TSGMNVG |
| | CC-HCDR1 | | |
| 2380 | MART A103 | artificial | HIWWNDDKYYNPALKS |
| | CC-HCDR2 | | |
| 2381 | MART A103 | artificial | SYFGDYVWYFDV |
| | CC-HCDR3 | | |
| 2382 | MART A103 | artificial | SASQGIHNYLN |
| | CC-LCDR1 | | |
| 2383 | MART A103 | artificial | YTSSLHS |
| | CC-LCDR2 | | |
| 2384 | MART A103 | artificial | QQYSKLPRT |
| | CC-LCDR3 | | |
| 2385 | MART A103 | artificial | QVTLKESGPGILQPSQTLSLTCSFSGFSLNTSGMNVGWIRQPSGKCLDWLAHIWWNDD |
| | CC-VH | | KYYNPALKSRLTISKDTSNNQVFLKIASVVTADTATYYCVRSYFGDYVWYFDVWGAGT |
| | | | TVTVSS |
| 2386 | MART A103 | artificial | DIQMTQTTSSLSASLGDRVTISCSASQGIHNYLNWYQQKPDGTVKLLIYYTSSLHSGV |
| | CC-VL | | PSRFSGSGSGTDYSLTISNLEPEDIATYFCQQYSKLPRTFGCGTKLEIK |
| 2387 | MART A103 | artificial | EIQMTQTTSSLSASLGDRVTISCSASQGIHNYLNWYQQKPDGTVKLLIYYTSSLHSGV |
| | CC EI GQ- | | PSRFSGSGSGTDYSLTISNLEPEDIATYFCQQYSKLPRTFGCGTKLEIK |
| | VL | | |
| 2388 | MS 15-B12 | artificial | SSSYFWG |
| | CC-HCDR1 | | |
| 2389 | MS 15-B12 | artificial | NIYYSGSSNYNPSLKS |
| | CC-HCDR2 | | |
| 2390 | MS 15-B12 | artificial | LPRGDRDAFDI |
| | CC-HCDR3 | | |
| 2391 | MS 15-B12 | artificial | RASQGISNYLA |
| | CC-LCDR1 | | |
| 2392 | MS 15-B12 | artificial | AASTLQS |
| | CC-LCDR2 | | |
| 2393 | MS 15-B12 | artificial | QQSYSTPFT |
| | CC-LCDR3 | | |
| 2394 | MS 15-B12 | artificial | QVQLQESGPGLVKPSETLSLTCTVSGGSISSSSYFWGWIRQPPGKCLEWIGNIYYSGS |
| | CC-VH | | SNYNPSLKSRVTISVDTSKNQFSLKLSSVTAADTAVYYCARLPRGDRDAFDIWGQGTM |
| | | | VTVSS |
| 2395 | MS 15-B12 | artificial | DIVMTQSPSSLSASVGDRVTITCRASQGISNYLAWYQQKPGKVPKLLIYAASTLQSGV |
| | CC-VL | | PSRFSGSGSGTDFTLTISSLQPEDFATYYCQQSYSTPFTFGCGTKVEIK |
| 2396 | MS 15-B12 | artificial | EIVMTQSPSSLSASVGDRVTITCRASQGISNYLAWYQQKPGKVPKLLIYAASTLQSGV |
| | CC EI GQ- | | PSRFSGSGSGTDFTLTISSLQPEDFATYYCQQSYSTPFTFGCGTKVEIK |
| | VL | | |
| 2397 | MS 5-F11 | artificial | DYYMT |
| | HCDR1 | | |
| 2398 | MS 5-F11 | artificial | YISSSGSTIYYADSVKG |
| | HCDR2 | | |
| 2399 | MS 5-F11 | artificial | DRNSHFDY |
| | HCDR3 | | |
| 2400 | MS 5-F11 | artificial | RASQGINTWLA |
| | LCDR1 | | |
| 2401 | MS 5-F11 | artificial | GASGLQS |
| | LCDR2 | | |
| 2402 | MS 5-F11- | artificial | QQAKSFPRT |
| | LCDR3 | | |
| 2403 | MS 5-F11 | artificial | QVQLVESGGGLVKPGGSLRLSCAASGFTFSDYYMTWIRQAPGKGLEWLSYISSSGSTI |
| | VH | | YYADSVKGRFTISRDNAKNSLFLQMNSLRAEDTAVYYCARDRNSHFDYWGQGTLVTVS |
| | | | S |
| 2404 | MS 5-F11 | artificial | DIQMTQSPSSVSASVGDRVTITCRASQGINTWLAWYQQKPGKAPKLLIYGASGLQSGV |
| | VL | | PSRFSGSGSGTDFTLTISSLQPEDFATYYCQQAKSFPRTFGQGTKVEIK |
| 2405 | MS 5-F11 EI | artificial | EIQMTQSPSSVSASVGDRVTITCRASQGINTWLAWYQQKPGKAPKLLIYGASGLQSGV |
| | GQ-VL | | PSRFSGSGSGTDFTLTISSLQPEDFATYYCQQAKSFPRTFGQGTKVEIK |
| 2406 | MS R4L CC- | artificial | GYYIH |
| | HCDR1 | | |
| 2407 | MS R4L CC- | artificial | WINPNSGGTNYAQKFQG |
| | HCDR2 | | |
| 2408 | MS R4L CC- | artificial | VEAVAGREYYYFSGMDV |
| | HCDR3 | | |
| 2409 | MS R4L CC- | artificial | SGEKLGDKYVY |
| | LCDR1 | | |
| 2410 | MS R4L CC- | artificial | QSTKRPS |
| | LCDR2 | | |
| 2411 | MS R4L CC- | artificial | QAYHASTAV |
| | LCDR3 | | |
| 2412 | MS R4L CC- | artificial | QVQLVQSGAEVKKPGASVKVSCKASGYTFTGYYIHWVRQAPGQCLEWMGWINPNSGGT |
| | VH | | NYAQKFQGRVTMTRDTSISTAYMELSRLRSDDTAVYYCARVEAVAGREYYYFSGMDVW |
| | | | GQGTTVTVSS |
| 2413 | MS R4L CC- | artificial | SYELTQPPSVSVSPGQTASITCSGEKLGDKYVYWYQQKPGQSPVLVIYQSTKRPSGVP |
| | VL | | ERFSGSNSGNTATLTISGTQAMDEADYYCQAYHASTAVFGCGTKLTVL |
| 2414 | MS 15-B12 | artificial | QVQLQESGPGLVKPSETLSLTCTVSGGSISSSSYFWGWIRQPPGKCLEWIGNIYYSGS |
| | CC x I2C x | | SNYNPSLKSRVTISVDTSKNQFSLKLSSVTAADTAVYYCARLPRGDRDAFDIWGQGTM |
| | scFc-Full | | VTVSSGGGGSGGGGSGGGGSDIVMTQSPSSLSASVGDRVTITCRASQGISNYLAWYQQ |
| | Sequence | | KPGKVPKLLIYAASTLQSGVPSRFSGSGSGTDFTLTISSLQPEDFATYYCQQSYSTPF |
| | | | TFGCGTKVEIKSGGGGSEVQLVESGGGLVQPGGSLKLSCAASGFTENKYAMNWVRQAP |
| | | | GKGLEWVARIRSKYNNYATYYADSVKDRFTISRDDSKNTAYLQMNNLKTEDTAVYYCV |
| | | | RHGNFGNSYISYWAYWGQGTLVTVSSGGGGSGGGGSGGGGSQTVVTQEPSLTVSPGGT |
| | | | VTLTCGSSTGAVTSGNYPNWVQQKPGQAPRGLIGGTKFLAPGTPARFSGSLLGGKAAL |
| | | | TLSGVQPEDEAEYYCVLWYSNRWVFGGGTKLTVLGGGGDKTHTCPPCPAPELLGGPSV |
| | | | FLFPPKPKDTLMISRTPEVTCVVVDVSHEDPEVKENWYVDGVEVHNAKTKPCEEQYGS |
| | | | TYRCVSVLTVLHQDWLNGKEYKCKVSNKALPAPIEKTISKAKGQPREPQVYTLPPSRE |
| | | | EMTKNQVSLTCLVKGFYPSDIAVEWESNGQPENNYKTTPPVLDSDGSFFLYSKLTVDK |
| | | | SRWQQGNVFSCSVMHEALHNHYTQKSLSLSPGKGGGGSGGGGSGGGGSGGGGSGGGGS |
| | | | GGGGSDKTHTCPPCPAPELLGGPSVFLFPPKPKDTLMISRTPEVTCVVVDVSHEDPEV |
| | | | KFNWYVDGVEVHNAKTKPCEEQYGSTYRCVSVLTVLHQDWLNGKEYKCKVSNKALPAP |
| | | | IEKTISKAKGQPREPQVYTLPPSREEMTKNQVSLTCLVKGFYPSDIAVEWESNGQPEN |
| | | | NYKTTPPVLDSDGSFFLYSKLTVDKSRWQQGNVFSCSVMHEALHNHYTQKSLSLSPGK |
| 2415 | MS 15-B12 | artificial | QVQLQESGPGLVKPSETLSLTCTVSGGSISSSSYFWGWIRQPPGKCLEWIGNIYYSGS |
| | CC x I2E x | | SNYNPSLKSRVTISVDTSKNQFSLKLSSVTAADTAVYYCARLPRGDRDAFDIWGQGTM |
| | ScFc-Full | | VTVSSGGGGSGGGGSGGGGSDIVMTQSPSSLSASVGDRVTITCRASQGISNYLAWYQQ |
| | Sequence | | KPGKVPKLLIYAASTLQSGVPSRFSGSGSGTDFTLTISSLQPEDFATYYCQQSYSTPF |
| | | | TFGCGTKVEIKSGGGGSEVQLVESGGGLVQPGGSLKLSCAASGFTENKYAINWVRQAP |
| | | | GKGLEWVARIRSKYNNYATYYADAVKDRFTISRDDSKNTVYLQMNNLKTEDTAVYYCA |
| | | | RAGNFGSSYISYWAYWGQGTLVTVSSGGGGSGGGGSGGGGSQTVVTQEPSLTVSPGGT |
| | | | VTITCGSSTGAVTSGNYPNWVQKKPGQAPRGLIGGTKFLAPGTPARFSGSLSGGKAAL |
| | | | TLSGVQPEDEAEYYCVLWYSNRWVFGSGTKLTVLGGGGDKTHTCPPCPAPELLGGPSV |
| | | | FLFPPKPKDTLMISRTPEVTCVVVDVSHEDPEVKENWYVDGVEVHNAKTKPCEEQYGS |
| | | | TYRCVSVLTVLHQDWLNGKEYKCKVSNKALPAPIEKTISKAKGQPREPQVYTLPPSRE |
| | | | EMTKNQVSLTCLVKGFYPSDIAVEWESNGQPENNYKTTPPVLDSDGSFFLYSKLTVDK |
| | | | SRWQQGNVFSCSVMHEALHNHYTQKSLSLSPGKGGGGSGGGGSGGGGSGGGGSGGGGS |
| | | | GGGGSDKTHTCPPCPAPELLGGPSVFLFPPKPKDTLMISRTPEVTCVVVDVSHEDPEV |
| | | | KFNWYVDGVEVHNAKTKPCEEQYGSTYRCVSVLTVLHQDWLNGKEYKCKVSNKALPAP |
| | | | IEKTISKAKGQPREPQVYTLPPSREEMTKNQVSLTCLVKGFYPSDIAVEWESNGQPEN |
| | | | NYKTTPPVLDSDGSFFLYSKLTVDKSRWQQGNVFSCSVMHEALHNHYTQKSLSLSPGK |
| 2416 | MS 15-B12 | artificial | QVQLQESGPGLVKPSETLSLTCTVSGGSISSSSYFWGWIRQPPGKCLEWIGNIYYSGS |
| | CC x I2K x | | SNYNPSLKSRVTISVDTSKNQFSLKLSSVTAADTAVYYCARLPRGDRDAFDIWGQGTM |
| | scFc-Full | | VTVSSGGGGSGGGGSGGGGSDIVMTQSPSSLSASVGDRVTITCRASQGISNYLAWYQQ |
| | Sequence | | KPGKVPKLLIYAASTLQSGVPSRFSGSGSGTDFTLTISSLQPEDFATYYCQQSYSTPF |
| | | | TFGCGTKVEIKSGGGGSEVQLVESGGGLVQPGGSLKLSCAASGFTFNKYAMNWVRQAP |
| | | | GKGLEWVARIRSKYNNYATYYAEAVKGRFTISRDDSKNTVYLQMNNLKTEDTAVYYCV |
| | | | RNENIGTSYISYWAYWGQGTLVTVSSGGGGSGGGGSGGGGSQTVVTQEPSLTVSPGGT |
| | | | VTITCGSSTGAVTSGNYPNWVQQKPGQAPRGLIGGTKFLAPGTPARFSGSLSGGKAAL |
| | | | TLSGVQPEDEAEYYCVLWYSNRWVFGSGTKLTVLGGGGDKTHTCPPCPAPELLGGPSV |
| | | | FLFPPKPKDTLMISRTPEVTCVVVDVSHEDPEVKENWYVDGVEVHNAKTKPCEEQYGS |
| | | | TYRCVSVLTVLHQDWLNGKEYKCKVSNKALPAPIEKTISKAKGQPREPQVYTLPPSRE |
| | | | EMTKNQVSLTCLVKGFYPSDIAVEWESNGQPENNYKTTPPVLDSDGSFFLYSKLTVDK |
| | | | SRWQQGNVFSCSVMHEALHNHYTQKSLSLSPGKGGGGSGGGGSGGGGSGGGGSGGGGS |
| | | | GGGGSDKTHTCPPCPAPELLGGPSVFLFPPKPKDTLMISRTPEVTCVVVDVSHEDPEV |
| | | | KFNWYVDGVEVHNAKTKPCEEQYGSTYRCVSVLTVLHQDWLNGKEYKCKVSNKALPAP |
| | | | IEKTISKAKGQPREPQVYTLPPSREEMTKNQVSLTCLVKGFYPSDIAVEWESNGQPEN |
| | | | NYKTTPPVLDSDGSFFLYSKLTVDKSRWQQGNVFSCSVMHEALHNHYTQKSLSLSPGK |
| 2417 | MS 15-B12 | artificial | QVQLQESGPGLVKPSETLSLTCTVSGGSISSSSYFWGWIRQPPGKCLEWIGNIYYSGS |
| | CC x I2L x | | SNYNPSLKSRVTISVDTSKNQFSLKLSSVTAADTAVYYCARLPRGDRDAFDIWGQGTM |
| | scFc-Full | | VTVSSGGGGSGGGGSGGGGSDIVMTQSPSSLSASVGDRVTITCRASQGISNYLAWYQQ |
| | Sequence | | KPGKVPKLLIYAASTLQSGVPSRFSGSGSGTDFTLTISSLQPEDFATYYCQQSYSTPF |
| | | | TFGCGTKVEIKSGGGGSEVQLVESGGGLVQPGGSLKLSCAASGFTFNKYAMNWVRQAP |
| | | | GKGMEWVARIRSKYNNYATYYADAVKDRFTISRDDSKNTLYLQMNNLKTEDTAVYYCV |
| | | | RAGNFGSSYISYFAYWGQGTLVTVSSGGGGSGGGGSGGGGSQTVVTQEPSLTVSPGGT |
| | | | VTITCGSSTGAVTSGNYPNWIQKKPGQAPRGLIGGTKFLAPGTPARFSGSLEGGKAAL |
| | | | TLSGVQPEDEAEYYCVLYYSNRWVFGSGTKLTVLGGGGDKTHTCPPCPAPELLGGPSV |
| | | | FLFPPKPKDTLMISRTPEVTCVVVDVSHEDPEVKENWYVDGVEVHNAKTKPCEEQYGS |
| | | | TYRCVSVLTVLHQDWLNGKEYKCKVSNKALPAPIEKTISKAKGQPREPQVYTLPPSRE |
| | | | EMTKNQVSLTCLVKGFYPSDIAVEWESNGQPENNYKTTPPVLDSDGSFFLYSKLTVDK |
| | | | SRWQQGNVFSCSVMHEALHNHYTQKSLSLSPGKGGGGSGGGGSGGGGSGGGGSGGGGS |
| | | | GGGGSDKTHTCPPCPAPELLGGPSVFLFPPKPKDTLMISRTPEVTCVVVDVSHEDPEV |
| | | | KFNWYVDGVEVHNAKTKPCEEQYGSTYRCVSVLTVLHQDWLNGKEYKCKVSNKALPAP |
| | | | IEKTISKAKGQPREPQVYTLPPSREEMTKNQVSLTCLVKGFYPSDIAVEWESNGQPEN |
| | | | NYKTTPPVLDSDGSFFLYSKLTVDKSRWQQGNVFSCSVMHEALHNHYTQKSLSLSPGK |
| 2418 | MS 15-B12 | artificial | QVQLQESGPGLVKPSETLSLTCTVSGGSISSSSYFWGWIRQPPGKCLEWIGNIYYSGS |
| | CC x I2M x | | SNYNPSLKSRVTISVDTSKNQFSLKLSSVTAADTAVYYCARLPRGDRDAFDIWGQGTM |
| | ScFc-Full | | VTVSSGGGGSGGGGSGGGGSDIVMTQSPSSLSASVGDRVTITCRASQGISNYLAWYQQ |
| | Sequence | | KPGKVPKLLIYAASTLQSGVPSRFSGSGSGTDFTLTISSLQPEDFATYYCQQSYSTPF |
| | | | TFGCGTKVEIKSGGGGSEVQLVESGGGLVQPGGSLKLSCAASGFTFNKYAMNWVRQAP |
| | | | GKGMEWVARIRSKYNNYATYYADAVKDRFTISRDDSKNTLYLQMNNLKTEDTAVYYCV |
| | | | RAGNFGTSYISYWAYWGQGTLVTVSSGGGGSGGGGSGGGGSQTVVTQEPSLTVSPGGT |
| | | | VTITCGSSTGAVTSGNYPNWVQKKPGQAPRGLIGGTKFLAPGTPARFSGSLSGGKAAL |
| | | | TLSGVQPEDEAEYYCVLWYSNRWVFGSGTKLTVLGGGGDKTHTCPPCPAPELLGGPSV |
| | | | FLFPPKPKDTLMISRTPEVTCVVVDVSHEDPEVKFNWYVDGVEVHNAKTKPCEEQYGS |
| | | | TYRCVSVLTVLHQDWLNGKEYKCKVSNKALPAPIEKTISKAKGQPREPQVYTLPPSRE |
| | | | EMTKNQVSLTCLVKGFYPSDIAVEWESNGQPENNYKTTPPVLDSDGSFFLYSKLTVDK |
| | | | SRWQQGNVFSCSVMHEALHNHYTQKSLSLSPGKGGGGSGGGGSGGGGSGGGGSGGGGS |
| | | | GGGGSDKTHTCPPCPAPELLGGPSVFLFPPKPKDTLMISRTPEVTCVVVDVSHEDPEV |
| | | | KFNWYVDGVEVHNAKTKPCEEQYGSTYRCVSVLTVLHQDWLNGKEYKCKVSNKALPAP |
| | | | IEKTISKAKGQPREPQVYTLPPSREEMTKNQVSLTCLVKGFYPSDIAVEWESNGQPEN |
| | | | NYKTTPPVLDSDGSFFLYSKLTVDKSRWQQGNVFSCSVMHEALHNHYTQKSLSLSPGK |
| 2419 | MS 15-B12 | artificial | QVQLQESGPGLVKPSETLSLTCTVSGGSISSSSYFWGWIRQPPGKCLEWIGNIYYSGS |
| | CC x I2M2 x | | SNYNPSLKSRVTISVDTSKNQFSLKLSSVTAADTAVYYCARLPRGDRDAFDIWGQGTM |
| | scFc-Full | | VTVSSGGGGSGGGGSGGGGSDIVMTQSPSSLSASVGDRVTITCRASQGISNYLAWYQQ |
| | Sequence | | KPGKVPKLLIYAASTLQSGVPSRFSGSGSGTDFTLTISSLQPEDFATYYCQQSYSTPF |
| | | | TFGCGTKVEIKSGGGGSEVQLVESGGGLVQPGGSLKLSCAASGFTFNKYAINWVREAP |
| | | | GKGLEWVARIRSKYNNYATYYADAVKDRFTISRDDSKNTAYLQMNNLKTEDTAVYYCV |
| | | | RNANFGTSYISYFAYWGQGTLVTVSSGGGGSGGGGSGGGGSQTVVTQEPSLTVSPGGT |
| | | | VTLTCGSSTGAVTSGNYPNWVQKKPGQAPRGLIGGTKFLAPGTPARFSGSLLGGKAAL |
| | | | TLSGVQPEDEAEYYCVLWYSNRWVFGSGTKLTVLGGGGDKTHTCPPCPAPELLGGPSV |
| | | | FLFPPKPKDTLMISRTPEVTCVVVDVSHEDPEVKENWYVDGVEVHNAKTKPCEEQYGS |
| | | | TYRCVSVLTVLHQDWLNGKEYKCKVSNKALPAPIEKTISKAKGQPREPQVYTLPPSRE |
| | | | EMTKNQVSLTCLVKGFYPSDIAVEWESNGQPENNYKTTPPVLDSDGSFFLYSKLTVDK |
| | | | SRWQQGNVFSCSVMHEALHNHYTQKSLSLSPGKGGGGSGGGGSGGGGSGGGGSGGGGS |
| | | | GGGGSDKTHTCPPCPAPELLGGPSVFLFPPKPKDTLMISRTPEVTCVVVDVSHEDPEV |
| | | | KFNWYVDGVEVHNAKTKPCEEQYGSTYRCVSVLTVLHQDWLNGKEYKCKVSNKALPAP |
| | | | IEKTISKAKGQPREPQVYTLPPSREEMTKNQVSLTCLVKGFYPSDIAVEWESNGQPEN |
| | | | NYKTTPPVLDSDGSFFLYSKLTVDKSRWQQGNVFSCSVMHEALHNHYTQKSLSLSPGK |
| 2420 | MS 5-F11 x | artificial | QVQLVESGGGLVKPGGSLRLSCAASGFTFSDYYMTWIRQAPGKGLEWLSYISSSGSTI |
| | I2Cx scFc- | | YYADSVKGRFTISRDNAKNSLFLQMNSLRAEDTAVYYCARDRNSHFDYWGQGTLVTVS |
| | Full | | SGGGGSGGGGSGGGGSDIQMTQSPSSVSASVGDRVTITCRASQGINTWLAWYQQKPGK |
| | Sequence | | APKLLIYGASGLQSGVPSRFSGSGSGTDFTLTISSLQPEDFATYYCQQAKSFPRTFGQ |
| | | | GTKVEIKSGGGGSEVQLVESGGGLVQPGGSLKLSCAASGFTFNKYAMNWVRQAPGKGL |
| | | | EWVARIRSKYNNYATYYADSVKDRFTISRDDSKNTAYLQMNNLKTEDTAVYYCVRHGN |
| | | | FGNSYISYWAYWGQGTLVTVSSGGGGSGGGGSGGGGSQTVVTQEPSLTVSPGGTVTLT |
| | | | CGSSTGAVTSGNYPNWVQQKPGQAPRGLIGGTKFLAPGTPARFSGSLLGGKAALTLSG |
| | | | VQPEDEAEYYCVLWYSNRWVFGGGTKLTVLGGGGDKTHTCPPCPAPELLGGPSVFLFP |
| | | | PKPKDTLMISRTPEVTCVVVDVSHEDPEVKFNWYVDGVEVHNAKTKPCEEQYGSTYRC |
| | | | VSVLTVLHQDWLNGKEYKCKVSNKALPAPIEKTISKAKGQPREPQVYTLPPSREEMTK |
| | | | NQVSLTCLVKGFYPSDIAVEWESNGQPENNYKTTPPVLDSDGSFFLYSKLTVDKSRWQ |
| | | | QGNVFSCSVMHEALHNHYTQKSLSLSPGKGGGGSGGGGSGGGGSGGGGSGGGGSGGGG |
| | | | SDKTHTCPPCPAPELLGGPSVFLFPPKPKDTLMISRTPEVTCVVVDVSHEDPEVKENW |
| | | | YVDGVEVHNAKTKPCEEQYGSTYRCVSVLTVLHQDWLNGKEYKCKVSNKALPAPIEKT |
| | | | ISKAKGQPREPQVYTLPPSREEMTKNQVSLTCLVKGFYPSDIAVEWESNGQPENNYKT |
| | | | TPPVLDSDGSFFLYSKLTVDKSRWQQGNVFSCSVMHEALHNHYTQKSLSLSPGK |
| 2421 | MS 5-F11 x | artificial | QVQLVESGGGLVKPGGSLRLSCAASGFTFSDYYMTWIRQAPGKGLEWLSYISSSGSTI |
| | I2Ex scFc- | | YYADSVKGRFTISRDNAKNSLFLQMNSLRAEDTAVYYCARDRNSHFDYWGQGTLVTVS |
| | Full | | SGGGGSGGGGSGGGGSDIQMTQSPSSVSASVGDRVTITCRASQGINTWLAWYQQKPGK |
| | Sequence | | APKLLIYGASGLQSGVPSRFSGSGSGTDFTLTISSLQPEDFATYYCQQAKSFPRTFGQ |
| | | | GTKVEIKSGGGGSEVQLVESGGGLVQPGGSLKLSCAASGFTFNKYAINWVRQAPGKGL |
| | | | EWVARIRSKYNNYATYYADAVKDRFTISRDDSKNTVYLQMNNLKTEDTAVYYCARAGN |
| | | | FGSSYISYWAYWGQGTLVTVSSGGGGSGGGGSGGGGSQTVVTQEPSLTVSPGGTVTIT |
| | | | CGSSTGAVTSGNYPNWVQKKPGQAPRGLIGGTKFLAPGTPARFSGSLSGGKAALTLSG |
| | | | VQPEDEAEYYCVLWYSNRWVFGSGTKLTVLGGGGDKTHTCPPCPAPELLGGPSVFLFP |
| | | | PKPKDTLMISRTPEVTCVVVDVSHEDPEVKFNWYVDGVEVHNAKTKPCEEQYGSTYRC |
| | | | VSVLTVLHQDWLNGKEYKCKVSNKALPAPIEKTISKAKGQPREPQVYTLPPSREEMTK |
| | | | NQVSLTCLVKGFYPSDIAVEWESNGQPENNYKTTPPVLDSDGSFFLYSKLTVDKSRWQ |
| | | | QGNVFSCSVMHEALHNHYTQKSLSLSPGKGGGGSGGGGSGGGGSGGGGSGGGGSGGGG |
| | | | SDKTHTCPPCPAPELLGGPSVFLFPPKPKDTLMISRTPEVTCVVVDVSHEDPEVKENW |
| | | | YVDGVEVHNAKTKPCEEQYGSTYRCVSVLTVLHQDWLNGKEYKCKVSNKALPAPIEKT |
| | | | ISKAKGQPREPQVYTLPPSREEMTKNQVSLTCLVKGFYPSDIAVEWESNGQPENNYKT |
| | | | TPPVLDSDGSFFLYSKLTVDKSRWQQGNVFSCSVMHEALHNHYTQKSLSLSPGK |
| 2422 | MS 5-F11 x | artificial | QVQLVESGGGLVKPGGSLRLSCAASGFTFSDYYMTWIRQAPGKGLEWLSYISSSGSTI |
| | I2Kx scFc- | | YYADSVKGRFTISRDNAKNSLFLQMNSLRAEDTAVYYCARDRNSHFDYWGQGTLVTVS |
| | Full | | SGGGGSGGGGSGGGGSDIQMTQSPSSVSASVGDRVTITCRASQGINTWLAWYQQKPGK |
| | Sequence | | APKLLIYGASGLQSGVPSRFSGSGSGTDFTLTISSLQPEDFATYYCQQAKSFPRTFGQ |
| | | | GTKVEIKSGGGGSEVQLVESGGGLVQPGGSLKLSCAASGFTFNKYAMNWVRQAPGKGL |
| | | | EWVARIRSKYNNYATYYAEAVKGRFTISRDDSKNTVYLQMNNLKTEDTAVYYCVRNEN |
| | | | IGTSYISYWAYWGQGTLVTVSSGGGGSGGGGSGGGGSQTVVTQEPSLTVSPGGTVTIT |
| | | | CGSSTGAVTSGNYPNWVQQKPGQAPRGLIGGTKFLAPGTPARFSGSLSGGKAALTLSG |
| | | | VQPEDEAEYYCVLWYSNRWVFGSGTKLTVLGGGGDKTHTCPPCPAPELLGGPSVFLFP |
| | | | PKPKDTLMISRTPEVTCVVVDVSHEDPEVKENWYVDGVEVHNAKTKPCEEQYGSTYRC |
| | | | VSVLTVLHQDWLNGKEYKCKVSNKALPAPIEKTISKAKGQPREPQVYTLPPSREEMTK |
| | | | NQVSLTCLVKGFYPSDIAVEWESNGQPENNYKTTPPVLDSDGSFFLYSKLTVDKSRWQ |
| | | | QGNVFSCSVMHEALHNHYTQKSLSLSPGKGGGGSGGGGSGGGGSGGGGSGGGGSGGGG |
| | | | SDKTHTCPPCPAPELLGGPSVFLFPPKPKDTLMISRTPEVTCVVVDVSHEDPEVKENW |
| | | | YVDGVEVHNAKTKPCEEQYGSTYRCVSVLTVLHQDWLNGKEYKCKVSNKALPAPIEKT |
| | | | ISKAKGQPREPQVYTLPPSREEMTKNQVSLTCLVKGFYPSDIAVEWESNGQPENNYKT |
| | | | TPPVLDSDGSFFLYSKLTVDKSRWQQGNVFSCSVMHEALHNHYTQKSLSLSPGK |
| 2423 | MS 5-F11 x | artificial | QVQLVESGGGLVKPGGSLRLSCAASGFTFSDYYMTWIRQAPGKGLEWLSYISSSGSTI |
| | I2Lx scFc- | | YYADSVKGRFTISRDNAKNSLFLQMNSLRAEDTAVYYCARDRNSHFDYWGQGTLVTVS |
| | Full | | SGGGGSGGGGSGGGGSDIQMTQSPSSVSASVGDRVTITCRASQGINTWLAWYQQKPGK |
| | Sequence | | APKLLIYGASGLQSGVPSRFSGSGSGTDFTLTISSLQPEDFATYYCQQAKSFPRTFGQ |
| | | | GTKVEIKSGGGGSEVQLVESGGGLVQPGGSLKLSCAASGFTFNKYAMNWVRQAPGKGM |
| | | | EWVARIRSKYNNYATYYADAVKDRFTISRDDSKNTLYLQMNNLKTEDTAVYYCVRAGN |
| | | | FGSSYISYFAYWGQGTLVTVSSGGGGSGGGGSGGGGSQTVVTQEPSLTVSPGGTVTIT |
| | | | CGSSTGAVTSGNYPNWIQKKPGQAPRGLIGGTKFLAPGTPARFSGSLEGGKAALTLSG |
| | | | VQPEDEAEYYCVLYYSNRWVFGSGTKLTVLGGGGDKTHTCPPCPAPELLGGPSVFLFP |
| | | | PKPKDTLMISRTPEVTCVVVDVSHEDPEVKFNWYVDGVEVHNAKTKPCEEQYGSTYRC |
| | | | VSVLTVLHQDWLNGKEYKCKVSNKALPAPIEKTISKAKGQPREPQVYTLPPSREEMTK |
| | | | NQVSLTCLVKGFYPSDIAVEWESNGQPENNYKTTPPVLDSDGSFFLYSKLTVDKSRWQ |
| | | | QGNVFSCSVMHEALHNHYTQKSLSLSPGKGGGGSGGGGSGGGGSGGGGSGGGGSGGGG |
| | | | SDKTHTCPPCPAPELLGGPSVFLFPPKPKDTLMISRTPEVTCVVVDVSHEDPEVKENW |
| | | | YVDGVEVHNAKTKPCEEQYGSTYRCVSVLTVLHQDWLNGKEYKCKVSNKALPAPIEKT |
| | | | ISKAKGQPREPQVYTLPPSREEMTKNQVSLTCLVKGFYPSDIAVEWESNGQPENNYKT |
| | | | TPPVLDSDGSFFLYSKLTVDKSRWQQGNVFSCSVMHEALHNHYTQKSLSLSPGK |
| 2424 | MS 5-F11 x | artificial | QVQLVESGGGLVKPGGSLRLSCAASGFTFSDYYMTWIRQAPGKGLEWLSYISSSGSTI |
| | I2M2x scFc | | YYADSVKGRFTISRDNAKNSLFLQMNSLRAEDTAVYYCARDRNSHFDYWGQGTLVTVS |
| | -Full | | SGGGGSGGGGSGGGGSDIQMTQSPSSVSASVGDRVTITCRASQGINTWLAWYQQKPGK |
| | Sequence | | APKLLIYGASGLQSGVPSRFSGSGSGTDFTLTISSLQPEDFATYYCQQAKSFPRTFGQ |
| | | | GTKVEIKSGGGGSEVQLVESGGGLVQPGGSLKLSCAASGFTFNKYAINWVREAPGKGL |
| | | | EWVARIRSKYNNYATYYADAVKDRFTISRDDSKNTAYLQMNNLKTEDTAVYYCVRNAN |
| | | | FGTSYISYFAYWGQGTLVTVSSGGGGSGGGGSGGGGSQTVVTQEPSLTVSPGGTVTLT |
| | | | CGSSTGAVTSGNYPNWVQKKPGQAPRGLIGGTKFLAPGTPARFSGSLLGGKAALTLSG |
| | | | VQPEDEAEYYCVLWYSNRWVFGSGTKLTVLGGGGDKTHTCPPCPAPELLGGPSVFLFP |
| | | | PKPKDTLMISRTPEVTCVVVDVSHEDPEVKENWYVDGVEVHNAKTKPCEEQYGSTYRC |
| | | | VSVLTVLHQDWLNGKEYKCKVSNKALPAPIEKTISKAKGQPREPQVYTLPPSREEMTK |
| | | | NQVSLTCLVKGFYPSDIAVEWESNGQPENNYKTTPPVLDSDGSFFLYSKLTVDKSRWQ |
| | | | QGNVFSCSVMHEALHNHYTQKSLSLSPGKGGGGSGGGGSGGGGSGGGGSGGGGSGGGG |
| | | | SDKTHTCPPCPAPELLGGPSVFLFPPKPKDTLMISRTPEVTCVVVDVSHEDPEVKENW |
| | | | YVDGVEVHNAKTKPCEEQYGSTYRCVSVLTVLHQDWLNGKEYKCKVSNKALPAPIEKT |
| | | | ISKAKGQPREPQVYTLPPSREEMTKNQVSLTCLVKGFYPSDIAVEWESNGQPENNYKT |
| | | | TPPVLDSDGSFFLYSKLTVDKSRWQQGNVFSCSVMHEALHNHYTQKSLSLSPGK |
| 2425 | MS 5-F11 x | artificial | QVQLVESGGGLVKPGGSLRLSCAASGFTFSDYYMTWIRQAPGKGLEWLSYISSSGSTI |
| | I2Mx scFc- | | YYADSVKGRFTISRDNAKNSLFLQMNSLRAEDTAVYYCARDRNSHFDYWGQGTLVTVS |
| | Full | | SGGGGSGGGGSGGGGSDIQMTQSPSSVSASVGDRVTITCRASQGINTWLAWYQQKPGK |
| | Sequence | | APKLLIYGASGLQSGVPSRFSGSGSGTDFTLTISSLQPEDFATYYCQQAKSFPRTFGQ |
| | | | GTKVEIKSGGGGSEVQLVESGGGLVQPGGSLKLSCAASGFTFNKYAMNWVRQAPGKGM |
| | | | EWVARIRSKYNNYATYYADAVKDRFTISRDDSKNTLYLQMNNLKTEDTAVYYCVRAGN |
| | | | FGTSYISYWAYWGQGTLVTVSSGGGGSGGGGSGGGGSQTVVTQEPSLTVSPGGTVTIT |
| | | | CGSSTGAVTSGNYPNWVQKKPGQAPRGLIGGTKFLAPGTPARFSGSLSGGKAALTLSG |
| | | | VQPEDEAEYYCVLWYSNRWVFGSGTKLTVLGGGGDKTHTCPPCPAPELLGGPSVFLFP |
| | | | PKPKDTLMISRTPEVTCVVVDVSHEDPEVKENWYVDGVEVHNAKTKPCEEQYGSTYRC |
| | | | VSVLTVLHQDWLNGKEYKCKVSNKALPAPIEKTISKAKGQPREPQVYTLPPSREEMTK |
| | | | NQVSLTCLVKGFYPSDIAVEWESNGQPENNYKTTPPVLDSDGSFFLYSKLTVDKSRWQ |
| | | | QGNVFSCSVMHEALHNHYTQKSLSLSPGKGGGGSGGGGSGGGGSGGGGSGGGGSGGGG |
| | | | SDKTHTCPPCPAPELLGGPSVFLFPPKPKDTLMISRTPEVTCVVVDVSHEDPEVKENW |
| | | | YVDGVEVHNAKTKPCEEQYGSTYRCVSVLTVLHQDWLNGKEYKCKVSNKALPAPIEKT |
| | | | ISKAKGQPREPQVYTLPPSREEMTKNQVSLTCLVKGFYPSDIAVEWESNGQPENNYKT |
| | | | TPPVLDSDGSFFLYSKLTVDKSRWQQGNVFSCSVMHEALHNHYTQKSLSLSPGK |
| 2426 | MS R4L CC x | artificial | QVQLVQSGAEVKKPGASVKVSCKASGYTFTGYYIHWVRQAPGQCLEWMGWINPNSGGT |
| | I2C x scFc | | NYAQKFQGRVTMTRDTSISTAYMELSRLRSDDTAVYYCARVEAVAGREYYYFSGMDVW |
| | -Full | | GQGTTVTVSSGGGGSGGGGSGGGGSSYELTQPPSVSVSPGQTASITCSGEKLGDKYVY |
| | Sequence | | WYQQKPGQSPVLVIYQSTKRPSGVPERFSGSNSGNTATLTISGTQAMDEADYYCQAYH |
| | | | ASTAVFGCGTKLTVLSGGGGSEVQLVESGGGLVQPGGSLKLSCAASGFTFNKYAMNWV |
| | | | RQAPGKGLEWVARIRSKYNNYATYYADSVKDRFTISRDDSKNTAYLQMNNLKTEDTAV |
| | | | YYCVRHGNFGNSYISYWAYWGQGTLVTVSSGGGGSGGGGSGGGGSQTVVTQEPSLTVS |
| | | | PGGTVTLTCGSSTGAVTSGNYPNWVQQKPGQAPRGLIGGTKFLAPGTPARFSGSLLGG |
| | | | KAALTLSGVQPEDEAEYYCVLWYSNRWVFGGGTKLTVLGGGGDKTHTCPPCPAPELLG |
| | | | GPSVFLFPPKPKDTLMISRTPEVTCVVVDVSHEDPEVKENWYVDGVEVHNAKTKPCEE |
| | | | QYGSTYRCVSVLTVLHQDWLNGKEYKCKVSNKALPAPIEKTISKAKGQPREPQVYTLP |
| | | | PSREEMTKNQVSLTCLVKGFYPSDIAVEWESNGQPENNYKTTPPVLDSDGSFFLYSKL |
| | | | TVDKSRWQQGNVFSCSVMHEALHNHYTQKSLSLSPGKGGGGSGGGGSGGGGSGGGGSG |
| | | | GGGSGGGGSDKTHTCPPCPAPELLGGPSVFLFPPKPKDTLMISRTPEVTCVVVDVSHE |
| | | | DPEVKFNWYVDGVEVHNAKTKPCEEQYGSTYRCVSVLTVLHQDWLNGKEYKCKVSNKA |
| | | | LPAPIEKTISKAKGQPREPQVYTLPPSREEMTKNQVSLTCLVKGFYPSDIAVEWESNG |
| | | | QPENNYKTTPPVLDSDGSFFLYSKLTVDKSRWQQGNVFSCSVMHEALHNHYTQKSLSL |
| | | | SPGK |
| 2427 | MS R4L CC x | artificial | QVQLVQSGAEVKKPGASVKVSCKASGYTFTGYYIHWVRQAPGQCLEWMGWINPNSGGT |
| | I2E x scFc | | NYAQKFQGRVTMTRDTSISTAYMELSRLRSDDTAVYYCARVEAVAGREYYYFSGMDVW |
| | -Full | | GQGTTVTVSSGGGGSGGGGSGGGGSSYELTQPPSVSVSPGQTASITCSGEKLGDKYVY |
| | Sequence | | WYQQKPGQSPVLVIYQSTKRPSGVPERFSGSNSGNTATLTISGTQAMDEADYYCQAYH |
| | | | ASTAVFGCGTKLTVLSGGGGSEVQLVESGGGLVQPGGSLKLSCAASGFTFNKYAINWV |
| | | | RQAPGKGLEWVARIRSKYNNYATYYADAVKDRFTISRDDSKNTVYLQMNNLKTEDTAV |
| | | | YYCARAGNFGSSYISYWAYWGQGTLVTVSSGGGGSGGGGSGGGGSQTVVTQEPSLTVS |
| | | | PGGTVTITCGSSTGAVTSGNYPNWVQKKPGQAPRGLIGGTKFLAPGTPARFSGSLSGG |
| | | | KAALTLSGVQPEDEAEYYCVLWYSNRWVFGSGTKLTVLGGGGDKTHTCPPCPAPELLG |
| | | | GPSVFLFPPKPKDTLMISRTPEVTCVVVDVSHEDPEVKENWYVDGVEVHNAKTKPCEE |
| | | | QYGSTYRCVSVLTVLHQDWLNGKEYKCKVSNKALPAPIEKTISKAKGQPREPQVYTLP |
| | | | PSREEMTKNQVSLTCLVKGFYPSDIAVEWESNGQPENNYKTTPPVLDSDGSFFLYSKL |
| | | | TVDKSRWQQGNVFSCSVMHEALHNHYTQKSLSLSPGKGGGGSGGGGSGGGGSGGGGSG |
| | | | GGGSGGGGSDKTHTCPPCPAPELLGGPSVFLFPPKPKDTLMISRTPEVTCVVVDVSHE |
| | | | DPEVKFNWYVDGVEVHNAKTKPCEEQYGSTYRCVSVLTVLHQDWLNGKEYKCKVSNKA |
| | | | LPAPIEKTISKAKGQPREPQVYTLPPSREEMTKNQVSLTCLVKGFYPSDIAVEWESNG |
| | | | QPENNYKTTPPVLDSDGSFFLYSKLTVDKSRWQQGNVFSCSVMHEALHNHYTQKSLSL |
| | | | SPGK |
| 2428 | MS R4L CC x | artificial | QVQLVQSGAEVKKPGASVKVSCKASGYTFTGYYIHWVRQAPGQCLEWMGWINPNSGGT |
| | I2K x scFc | | NYAQKFQGRVTMTRDTSISTAYMELSRLRSDDTAVYYCARVEAVAGREYYYFSGMDVW |
| | -Full | | GQGTTVTVSSGGGGSGGGGSGGGGSSYELTQPPSVSVSPGQTASITCSGEKLGDKYVY |
| | Sequence | | WYQQKPGQSPVLVIYQSTKRPSGVPERFSGSNSGNTATLTISGTQAMDEADYYCQAYH |
| | | | ASTAVFGCGTKLTVLSGGGGSEVQLVESGGGLVQPGGSLKLSCAASGFTENKYAMNWV |
| | | | RQAPGKGLEWVARIRSKYNNYATYYAEAVKGRFTISRDDSKNTVYLQMNNLKTEDTAV |
| | | | YYCVRNENIGTSYISYWAYWGQGTLVTVSSGGGGSGGGGSGGGGSQTVVTQEPSLTVS |
| | | | PGGTVTITCGSSTGAVTSGNYPNWVQQKPGQAPRGLIGGTKFLAPGTPARFSGSLSGG |
| | | | KAALTLSGVQPEDEAEYYCVLWYSNRWVFGSGTKLTVLGGGGDKTHTCPPCPAPELLG |
| | | | GPSVFLFPPKPKDTLMISRTPEVTCVVVDVSHEDPEVKFNWYVDGVEVHNAKTKPCEE |
| | | | QYGSTYRCVSVLTVLHQDWLNGKEYKCKVSNKALPAPIEKTISKAKGQPREPQVYTLP |
| | | | PSREEMTKNQVSLTCLVKGFYPSDIAVEWESNGQPENNYKTTPPVLDSDGSFFLYSKL |
| | | | TVDKSRWQQGNVFSCSVMHEALHNHYTQKSLSLSPGKGGGGSGGGGSGGGGSGGGGSG |
| | | | GGGSGGGGSDKTHTCPPCPAPELLGGPSVFLFPPKPKDTLMISRTPEVTCVVVDVSHE |
| | | | DPEVKFNWYVDGVEVHNAKTKPCEEQYGSTYRCVSVLTVLHQDWLNGKEYKCKVSNKA |
| | | | LPAPIEKTISKAKGQPREPQVYTLPPSREEMTKNQVSLTCLVKGFYPSDIAVEWESNG |
| | | | QPENNYKTTPPVLDSDGSFFLYSKLTVDKSRWQQGNVFSCSVMHEALHNHYTQKSLSL |
| | | | SPGK |
| 2429 | MS R4L CC x | artificial | QVQLVQSGAEVKKPGASVKVSCKASGYTFTGYYIHWVRQAPGQCLEWMGWINPNSGGT |
| | I2L x scFc | | NYAQKFQGRVTMTRDTSISTAYMELSRLRSDDTAVYYCARVEAVAGREYYYFSGMDVW |
| | Full | | GQGTTVTVSSGGGGSGGGGSGGGGSSYELTQPPSVSVSPGQTASITCSGEKLGDKYVY |
| | Sequence | | WYQQKPGQSPVLVIYQSTKRPSGVPERFSGSNSGNTATLTISGTQAMDEADYYCQAYH |
| | | | ASTAVFGCGTKLTVLSGGGGSEVQLVESGGGLVQPGGSLKLSCAASGFTENKYAMNWV |
| | | | RQAPGKGMEWVARIRSKYNNYATYYADAVKDRFTISRDDSKNTLYLQMNNLKTEDTAV |
| | | | YYCVRAGNFGSSYISYFAYWGQGTLVTVSSGGGGSGGGGSGGGGSQTVVTQEPSLTVS |
| | | | PGGTVTITCGSSTGAVTSGNYPNWIQKKPGQAPRGLIGGTKFLAPGTPARFSGSLEGG |
| | | | KAALTLSGVQPEDEAEYYCVLYYSNRWVFGSGTKLTVLGGGGDKTHTCPPCPAPELLG |
| | | | GPSVFLFPPKPKDTLMISRTPEVTCVVVDVSHEDPEVKENWYVDGVEVHNAKTKPCEE |
| | | | QYGSTYRCVSVLTVLHQDWLNGKEYKCKVSNKALPAPIEKTISKAKGQPREPQVYTLP |
| | | | PSREEMTKNQVSLTCLVKGFYPSDIAVEWESNGQPENNYKTTPPVLDSDGSFFLYSKL |
| | | | TVDKSRWQQGNVFSCSVMHEALHNHYTQKSLSLSPGKGGGGSGGGGSGGGGSGGGGSG |
| | | | GGGSGGGGSDKTHTCPPCPAPELLGGPSVFLFPPKPKDTLMISRTPEVTCVVVDVSHE |
| | | | DPEVKFNWYVDGVEVHNAKTKPCEEQYGSTYRCVSVLTVLHQDWLNGKEYKCKVSNKA |
| | | | LPAPIEKTISKAKGQPREPQVYTLPPSREEMTKNQVSLTCLVKGFYPSDIAVEWESNG |
| | | | QPENNYKTTPPVLDSDGSFFLYSKLTVDKSRWQQGNVFSCSVMHEALHNHYTQKSLSL |
| | | | SPGK |
| 2430 | MS R4L CC x | artificial | QVQLVQSGAEVKKPGASVKVSCKASGYTFTGYYIHWVRQAPGQCLEWMGWINPNSGGT |
| | I2M x scFc | | NYAQKFQGRVTMTRDTSISTAYMELSRLRSDDTAVYYCARVEAVAGREYYYFSGMDVW |
| | -Full | | GQGTTVTVSSGGGGSGGGGSGGGGSSYELTQPPSVSVSPGQTASITCSGEKLGDKYVY |
| | Sequence | | WYQQKPGQSPVLVIYQSTKRPSGVPERFSGSNSGNTATLTISGTQAMDEADYYCQAYH |
| | | | ASTAVFGCGTKLTVLSGGGGSEVQLVESGGGLVQPGGSLKLSCAASGFTENKYAMNWV |
| | | | RQAPGKGMEWVARIRSKYNNYATYYADAVKDRFTISRDDSKNTLYLQMNNLKTEDTAV |
| | | | YYCVRAGNFGTSYISYWAYWGQGTLVTVSSGGGGSGGGGSGGGGSQTVVTQEPSLTVS |
| | | | PGGTVTITCGSSTGAVTSGNYPNWVQKKPGQAPRGLIGGTKFLAPGTPARFSGSLSGG |
| | | | KAALTLSGVQPEDEAEYYCVLWYSNRWVFGSGTKLTVLGGGGDKTHTCPPCPAPELLG |
| | | | GPSVFLFPPKPKDTLMISRTPEVTCVVVDVSHEDPEVKENWYVDGVEVHNAKTKPCEE |
| | | | QYGSTYRCVSVLTVLHQDWLNGKEYKCKVSNKALPAPIEKTISKAKGQPREPQVYTLP |
| | | | PSREEMTKNQVSLTCLVKGFYPSDIAVEWESNGQPENNYKTTPPVLDSDGSFFLYSKL |
| | | | TVDKSRWQQGNVFSCSVMHEALHNHYTQKSLSLSPGKGGGGSGGGGSGGGGSGGGGSG |
| | | | GGGSGGGGSDKTHTCPPCPAPELLGGPSVFLFPPKPKDTLMISRTPEVTCVVVDVSHE |
| | | | DPEVKFNWYVDGVEVHNAKTKPCEEQYGSTYRCVSVLTVLHQDWLNGKEYKCKVSNKA |
| | | | LPAPIEKTISKAKGQPREPQVYTLPPSREEMTKNQVSLTCLVKGFYPSDIAVEWESNG |
| | | | QPENNYKTTPPVLDSDGSFFLYSKLTVDKSRWQQGNVFSCSVMHEALHNHYTQKSLSL |
| | | | SPGK |
| 2431 | MS R4L CC x | artificial | QVQLVQSGAEVKKPGASVKVSCKASGYTFTGYYIHWVRQAPGQCLEWMGWINPNSGGT |
| | I2M2 x scFc | | NYAQKFQGRVTMTRDTSISTAYMELSRLRSDDTAVYYCARVEAVAGREYYYFSGMDVW |
| | -Full | | GQGTTVTVSSGGGGSGGGGSGGGGSSYELTQPPSVSVSPGQTASITCSGEKLGDKYVY |
| | Sequence | | WYQQKPGQSPVLVIYQSTKRPSGVPERFSGSNSGNTATLTISGTQAMDEADYYCQAYH |
| | | | ASTAVFGCGTKLTVLSGGGGSEVQLVESGGGLVQPGGSLKLSCAASGFTENKYAINWV |
| | | | REAPGKGLEWVARIRSKYNNYATYYADAVKDRFTISRDDSKNTAYLQMNNLKTEDTAV |
| | | | YYCVRNANFGTSYISYFAYWGQGTLVTVSSGGGGSGGGGSGGGGSQTVVTQEPSLTVS |
| | | | PGGTVTLTCGSSTGAVTSGNYPNWVQKKPGQAPRGLIGGTKFLAPGTPARFSGSLLGG |
| | | | KAALTLSGVQPEDEAEYYCVLWYSNRWVFGSGTKLTVLGGGGDKTHTCPPCPAPELLG |
| | | | GPSVFLFPPKPKDTLMISRTPEVTCVVVDVSHEDPEVKENWYVDGVEVHNAKTKPCEE |
| | | | QYGSTYRCVSVLTVLHQDWLNGKEYKCKVSNKALPAPIEKTISKAKGQPREPQVYTLP |
| | | | PSREEMTKNQVSLTCLVKGFYPSDIAVEWESNGQPENNYKTTPPVLDSDGSFFLYSKL |
| | | | TVDKSRWQQGNVFSCSVMHEALHNHYTQKSLSLSPGKGGGGSGGGGSGGGGSGGGGSG |
| | | | GGGSGGGGSDKTHTCPPCPAPELLGGPSVFLFPPKPKDTLMISRTPEVTCVVVDVSHE |
| | | | DPEVKFNWYVDGVEVHNAKTKPCEEQYGSTYRCVSVLTVLHQDWLNGKEYKCKVSNKA |
| | | | LPAPIEKTISKAKGQPREPQVYTLPPSREEMTKNQVSLTCLVKGFYPSDIAVEWESNG |
| | | | QPENNYKTTPPVLDSDGSFFLYSKLTVDKSRWQQGNVFSCSVMHEALHNHYTQKSLSI |
| | | | SPGK |
| 2432 | MU 8-B7 CC | artificial | GYYWS |
| | -HCDR1 | | |
| 2433 | MU 8-B7 CC | artificial | DIDASGSTKYNPSLKS |
| | -HCDR2 | | |
| 2434 | MU 8-B7 CC | artificial | KKYSTVWSYFDN |
| | -HCDR3 | | |
| 2435 | MU 8-B7 CC | artificial | SGDKLGDKYAS |
| | -LCDR1 | | |
| 2436 | MU 8-B7 CC | artificial | QDRKRPS |
| | LCDR2 | | |
| 2437 | MU 8-B7 CC | artificial | QAWGSSTAV |
| | -LCDR3 | | |
| 2438 | MU 8-B7 CC | artificial | QVQLQQWGAGLLKPSETLSLTCAVYGGSFSGYYWSWIRQPPGKCLEWIGDIDASGSTK |
| | -VH | | YNPSLKSRVTISLDTSKNQFSLKLNSVTAADTAVYFCARKKYSTVWSYFDNWGQGTLV |
| | | | TVSS |
| 2439 | MU 8-B7 CC | artificial | SYELTQPSSVSVPPGQTASITCSGDKLGDKYASWYQQKPGQSPVLVIYQDRKRPSGVP |
| | -VL | | ERFSGSNSGNTATLTISGTQAMDEADYYCQAWGSSTAVFGCGTKLTVL |
| 2440 | MU 8-B7 CC | artificial | QVQLQQWGAGLLKPSETLSLTCAVYGGSFSGYYWSWIRQPPGKCLEWIGDIDASGSTK |
| | x I2Cx scFc | | YNPSLKSRVTISLDTSKNQFSLKLNSVTAADTAVYFCARKKYSTVWSYFDNWGQGTLV |
| | -Full | | TVSSGGGGSGGGGSGGGGSSYELTQPSSVSVPPGQTASITCSGDKLGDKYASWYQQKP |
| | Sequence | | GQSPVLVIYQDRKRPSGVPERFSGSNSGNTATLTISGTQAMDEADYYCQAWGSSTAVF |
| | | | GCGTKLTVLSGGGGSEVQLVESGGGLVQPGGSLKLSCAASGFTFNKYAMNWVRQAPGK |
| | | | GLEWVARIRSKYNNYATYYADSVKDRFTISRDDSKNTAYLQMNNLKTEDTAVYYCVRH |
| | | | GNFGNSYISYWAYWGQGTLVTVSSGGGGSGGGGSGGGGSQTVVTQEPSLTVSPGGTVT |
| | | | LTCGSSTGAVTSGNYPNWVQQKPGQAPRGLIGGTKFLAPGTPARFSGSLLGGKAALTL |
| | | | SGVQPEDEAEYYCVLWYSNRWVFGGGTKLTVLGGGGDKTHTCPPCPAPELLGGPSVEL |
| | | | FPPKPKDTLMISRTPEVTCVVVDVSHEDPEVKENWYVDGVEVHNAKTKPCEEQYGSTY |
| | | | RCVSVLTVLHQDWLNGKEYKCKVSNKALPAPIEKTISKAKGQPREPQVYTLPPSREEM |
| | | | TKNQVSLTCLVKGFYPSDIAVEWESNGQPENNYKTTPPVLDSDGSFFLYSKLTVDKSR |
| | | | WQQGNVFSCSVMHEALHNHYTQKSLSLSPGKGGGGSGGGGSGGGGSGGGGSGGGGSGG |
| | | | GGSDKTHTCPPCPAPELLGGPSVFLFPPKPKDTLMISRTPEVTCVVVDVSHEDPEVKF |
| | | | NWYVDGVEVHNAKTKPCEEQYGSTYRCVSVLTVLHQDWLNGKEYKCKVSNKALPAPIE |
| | | | KTISKAKGQPREPQVYTLPPSREEMTKNQVSLTCLVKGFYPSDIAVEWESNGQPENNY |
| | | | KTTPPVLDSDGSFFLYSKLTVDKSRWQQGNVFSCSVMHEALHNHYTQKSLSLSPGK |
| 2441 | MU 8-B7 CC | artificial | QVQLQQWGAGLLKPSETLSLTCAVYGGSFSGYYWSWIRQPPGKCLEWIGDIDASGSTK |
| | x I2Ex scFc | | YNPSLKSRVTISLDTSKNQFSLKLNSVTAADTAVYFCARKKYSTVWSYFDNWGQGTLV |
| | -Full | | TVSSGGGGSGGGGSGGGGSSYELTQPSSVSVPPGQTASITCSGDKLGDKYASWYQQKP |
| | Sequence | | GQSPVLVIYQDRKRPSGVPERFSGSNSGNTATLTISGTQAMDEADYYCQAWGSSTAVF |
| | | | GCGTKLTVLSGGGGSEVQLVESGGGLVQPGGSLKLSCAASGFTFNKYAINWVRQAPGK |
| | | | GLEWVARIRSKYNNYATYYADAVKDRFTISRDDSKNTVYLQMNNLKTEDTAVYYCARA |
| | | | GNFGSSYISYWAYWGQGTLVTVSSGGGGSGGGGSGGGGSQTVVTQEPSLTVSPGGTVT |
| | | | ITCGSSTGAVTSGNYPNWVQKKPGQAPRGLIGGTKFLAPGTPARFSGSLSGGKAALTL |
| | | | SGVQPEDEAEYYCVLWYSNRWVFGSGTKLTVLGGGGDKTHTCPPCPAPELLGGPSVFL |
| | | | FPPKPKDTLMISRTPEVTCVVVDVSHEDPEVKENWYVDGVEVHNAKTKPCEEQYGSTY |
| | | | RCVSVLTVLHQDWLNGKEYKCKVSNKALPAPIEKTISKAKGQPREPQVYTLPPSREEM |
| | | | TKNQVSLTCLVKGFYPSDIAVEWESNGQPENNYKTTPPVLDSDGSFFLYSKLTVDKSR |
| | | | WQQGNVFSCSVMHEALHNHYTQKSLSLSPGKGGGGSGGGGSGGGGSGGGGSGGGGSGG |
| | | | GGSDKTHTCPPCPAPELLGGPSVFLFPPKPKDTLMISRTPEVTCVVVDVSHEDPEVKF |
| | | | NWYVDGVEVHNAKTKPCEEQYGSTYRCVSVLTVLHQDWLNGKEYKCKVSNKALPAPIE |
| | | | KTISKAKGQPREPQVYTLPPSREEMTKNQVSLTCLVKGFYPSDIAVEWESNGQPENNY |
| | | | KTTPPVLDSDGSFFLYSKLTVDKSRWQQGNVFSCSVMHEALHNHYTQKSLSLSPGK |
| 2442 | MU 8-B7 CC | artificial | QVQLQQWGAGLLKPSETLSLTCAVYGGSFSGYYWSWIRQPPGKCLEWIGDIDASGSTK |
| | x I2Kx scFc | | YNPSLKSRVTISLDTSKNQFSLKLNSVTAADTAVYFCARKKYSTVWSYFDNWGQGTLV |
| | -Full | | TVSSGGGGSGGGGSGGGGSSYELTQPSSVSVPPGQTASITCSGDKLGDKYASWYQQKP |
| | Sequence | | GQSPVLVIYQDRKRPSGVPERFSGSNSGNTATLTISGTQAMDEADYYCQAWGSSTAVF |
| | | | GCGTKLTVLSGGGGSEVQLVESGGGLVQPGGSLKLSCAASGFTFNKYAMNWVRQAPGK |
| | | | GLEWVARIRSKYNNYATYYAEAVKGRFTISRDDSKNTVYLQMNNLKTEDTAVYYCVRN |
| | | | ENIGTSYISYWAYWGQGTLVTVSSGGGGSGGGGSGGGGSQTVVTQEPSLTVSPGGTVT |
| | | | ITCGSSTGAVTSGNYPNWVQQKPGQAPRGLIGGTKFLAPGTPARFSGSLSGGKAALTL |
| | | | SGVQPEDEAEYYCVLWYSNRWVFGSGTKLTVLGGGGDKTHTCPPCPAPELLGGPSVFL |
| | | | FPPKPKDTLMISRTPEVTCVVVDVSHEDPEVKFNWYVDGVEVHNAKTKPCEEQYGSTY |
| | | | RCVSVLTVLHQDWLNGKEYKCKVSNKALPAPIEKTISKAKGQPREPQVYTLPPSREEM |
| | | | TKNQVSLTCLVKGFYPSDIAVEWESNGQPENNYKTTPPVLDSDGSFFLYSKLTVDKSR |
| | | | WQQGNVFSCSVMHEALHNHYTQKSLSLSPGKGGGGSGGGGSGGGGSGGGGSGGGGSGG |
| | | | GGSDKTHTCPPCPAPELLGGPSVFLFPPKPKDTLMISRTPEVTCVVVDVSHEDPEVKF |
| | | | NWYVDGVEVHNAKTKPCEEQYGSTYRCVSVLTVLHQDWLNGKEYKCKVSNKALPAPIE |
| | | | KTISKAKGQPREPQVYTLPPSREEMTKNQVSLTCLVKGFYPSDIAVEWESNGQPENNY |
| | | | KTTPPVLDSDGSFFLYSKLTVDKSRWQQGNVFSCSVMHEALHNHYTQKSLSLSPGK |
| 2443 | MU 8-B7 CC | artificial | QVQLQQWGAGLLKPSETLSLTCAVYGGSFSGYYWSWIRQPPGKCLEWIGDIDASGSTK |
| | x I2Lx scFc | | YNPSLKSRVTISLDTSKNQFSLKLNSVTAADTAVYFCARKKYSTVWSYFDNWGQGTLV |
| | -Full | | TVSSGGGGSGGGGSGGGGSSYELTQPSSVSVPPGQTASITCSGDKLGDKYASWYQQKP |
| | Sequence | | GQSPVLVIYQDRKRPSGVPERFSGSNSGNTATLTISGTQAMDEADYYCQAWGSSTAVF |
| | | | GCGTKLTVLSGGGGSEVQLVESGGGLVQPGGSLKLSCAASGFTFNKYAMNWVRQAPGK |
| | | | GMEWVARIRSKYNNYATYYADAVKDRFTISRDDSKNTLYLQMNNLKTEDTAVYYCVRA |
| | | | GNFGSSYISYFAYWGQGTLVTVSSGGGGSGGGGSGGGGSQTVVTQEPSLTVSPGGTVT |
| | | | ITCGSSTGAVTSGNYPNWIQKKPGQAPRGLIGGTKFLAPGTPARFSGSLEGGKAALTL |
| | | | SGVQPEDEAEYYCVLYYSNRWVFGSGTKLTVLGGGGDKTHTCPPCPAPELLGGPSVFL |
| | | | FPPKPKDTLMISRTPEVTCVVVDVSHEDPEVKENWYVDGVEVHNAKTKPCEEQYGSTY |
| | | | RCVSVLTVLHQDWLNGKEYKCKVSNKALPAPIEKTISKAKGQPREPQVYTLPPSREEM |
| | | | TKNQVSLTCLVKGFYPSDIAVEWESNGQPENNYKTTPPVLDSDGSFFLYSKLTVDKSR |
| | | | WQQGNVFSCSVMHEALHNHYTQKSLSLSPGKGGGGSGGGGSGGGGSGGGGSGGGGSGG |
| | | | GGSDKTHTCPPCPAPELLGGPSVFLFPPKPKDTLMISRTPEVTCVVVDVSHEDPEVKF |
| | | | NWYVDGVEVHNAKTKPCEEQYGSTYRCVSVLTVLHQDWLNGKEYKCKVSNKALPAPIE |
| | | | KTISKAKGQPREPQVYTLPPSREEMTKNQVSLTCLVKGFYPSDIAVEWESNGQPENNY |
| | | | KTTPPVLDSDGSFFLYSKLTVDKSRWQQGNVFSCSVMHEALHNHYTQKSLSLSPGK |
| 2444 | MU 8-B7 CC | artificial | QVQLQQWGAGLLKPSETLSLTCAVYGGSFSGYYWSWIRQPPGKCLEWIGDIDASGSTK |
| | x I2M2x | | YNPSLKSRVTISLDTSKNQFSLKLNSVTAADTAVYFCARKKYSTVWSYFDNWGQGTLV |
| | scFc-Full | | TVSSGGGGSGGGGSGGGGSSYELTQPSSVSVPPGQTASITCSGDKLGDKYASWYQQKP |
| | Sequence | | GQSPVLVIYQDRKRPSGVPERFSGSNSGNTATLTISGTQAMDEADYYCQAWGSSTAVE |
| | | | GCGTKLTVLSGGGGSEVQLVESGGGLVQPGGSLKLSCAASGFTENKYAINWVREAPGK |
| | | | GLEWVARIRSKYNNYATYYADAVKDRFTISRDDSKNTAYLQMNNLKTEDTAVYYCVRN |
| | | | ANFGTSYISYFAYWGQGTLVTVSSGGGGSGGGGSGGGGSQTVVTQEPSLTVSPGGTVT |
| | | | LTCGSSTGAVTSGNYPNWVQKKPGQAPRGLIGGTKFLAPGTPARFSGSLLGGKAALTL |
| | | | SGVQPEDEAEYYCVLWYSNRWVFGSGTKLTVLGGGGDKTHTCPPCPAPELLGGPSVFL |
| | | | FPPKPKDTLMISRTPEVTCVVVDVSHEDPEVKFNWYVDGVEVHNAKTKPCEEQYGSTY |
| | | | RCVSVLTVLHQDWLNGKEYKCKVSNKALPAPIEKTISKAKGQPREPQVYTLPPSREEM |
| | | | TKNQVSLTCLVKGFYPSDIAVEWESNGQPENNYKTTPPVLDSDGSFFLYSKLTVDKSR |
| | | | WQQGNVFSCSVMHEALHNHYTQKSLSLSPGKGGGGSGGGGSGGGGSGGGGSGGGGSGG |
| | | | GGSDKTHTCPPCPAPELLGGPSVFLFPPKPKDTLMISRTPEVTCVVVDVSHEDPEVKF |
| | | | NWYVDGVEVHNAKTKPCEEQYGSTYRCVSVLTVLHQDWLNGKEYKCKVSNKALPAPIE |
| | | | KTISKAKGQPREPQVYTLPPSREEMTKNQVSLTCLVKGFYPSDIAVEWESNGQPENNY |
| | | | KTTPPVLDSDGSFFLYSKLTVDKSRWQQGNVFSCSVMHEALHNHYTQKSLSLSPGK |
| 2445 | MU 8-B7 CC | artificial | QVQLQQWGAGLLKPSETLSLTCAVYGGSFSGYYWSWIRQPPGKCLEWIGDIDASGSTK |
| | x I2Mx scFc | | YNPSLKSRVTISLDTSKNQFSLKLNSVTAADTAVYFCARKKYSTVWSYFDNWGQGTLV |
| | -Full | | TVSSGGGGSGGGGSGGGGSSYELTQPSSVSVPPGQTASITCSGDKLGDKYASWYQQKP |
| | Sequence | | GQSPVLVIYQDRKRPSGVPERFSGSNSGNTATLTISGTQAMDEADYYCQAWGSSTAVF |
| | | | GCGTKLTVLSGGGGSEVQLVESGGGLVQPGGSLKLSCAASGFTENKYAMNWVRQAPGK |
| | | | GMEWVARIRSKYNNYATYYADAVKDRFTISRDDSKNTLYLQMNNLKTEDTAVYYCVRA |
| | | | GNFGTSYISYWAYWGQGTLVTVSSGGGGSGGGGSGGGGSQTVVTQEPSLTVSPGGTVT |
| | | | ITCGSSTGAVTSGNYPNWVQKKPGQAPRGLIGGTKFLAPGTPARFSGSLSGGKAALTL |
| | | | SGVQPEDEAEYYCVLWYSNRWVFGSGTKLTVLGGGGDKTHTCPPCPAPELLGGPSVFL |
| | | | FPPKPKDTLMISRTPEVTCVVVDVSHEDPEVKFNWYVDGVEVHNAKTKPCEEQYGSTY |
| | | | RCVSVLTVLHQDWLNGKEYKCKVSNKALPAPIEKTISKAKGQPREPQVYTLPPSREEM |
| | | | TKNQVSLTCLVKGFYPSDIAVEWESNGQPENNYKTTPPVLDSDGSFFLYSKLTVDKSR |
| | | | WQQGNVFSCSVMHEALHNHYTQKSLSLSPGKGGGGSGGGGSGGGGSGGGGSGGGGSGG |
| | | | GGSDKTHTCPPCPAPELLGGPSVFLFPPKPKDTLMISRTPEVTCVVVDVSHEDPEVKE |
| | | | NWYVDGVEVHNAKTKPCEEQYGSTYRCVSVLTVLHQDWLNGKEYKCKVSNKALPAPIE |
| | | | KTISKAKGQPREPQVYTLPPSREEMTKNQVSLTCLVKGFYPSDIAVEWESNGQPENNY |
| | | | KTTPPVLDSDGSFFLYSKLTVDKSRWQQGNVFSCSVMHEALHNHYTQKSLSLSPGK |
| 2446 | PM 76-B10- | artificial | DYYMY |
| | HCDR1 | | |
| 2447 | PM 76-B10- | artificial | IISDGGYYTYYSDIIKG |
| | HCDR2 | | |
| 2448 | PM 76-B10- | artificial | GFPLLRHGAMDY |
| | HCDR3 | | |
| 2449 | PM 76-B10- | artificial | KASQNVDTNVA |
| | LCDR1 | | |
| 2450 | PM 76-B10- | artificial | SASYRYS |
| | LCDR2 | | |
| 2451 | PM 76-B10- | artificial | QQYDSYPYT |
| | LCDR3 | | |
| 2452 | PM 76-B10- | artificial | QVQLVESGGGLVKPGESLRLSCAASGFTFSDYYMYWVRQAPGKGLEWVAIISDGGYYT |
| | VH | | YYSDIIKGRFTISRDNAKNSLYLQMNSLKAEDTAVYYCARGFPLLRHGAMDYWGQGTL |
| | | | VTVSS |
| 2453 | PM 76-B10- | artificial | DIQMTQSPSSLSASVGDRVTITCKASQNVDTNVAWYQQKPGQAPKSLIYSASYRYSDV |
| | VL | | PSRFSGSASGTDFTLTISSVQSEDFATYYCQQYDSYPYTFGGGTKLEIK |
| 2454 | PM 76-B10 | artificial | EIQMTQSPSSLSASVGDRVTITCKASQNVDTNVAWYQQKPGQAPKSLIYSASYRYSDV |
| | EI GQ-VL | | PSRFSGSASGTDFTLTISSVQSEDFATYYCQQYDSYPYTFGGGTKLEIK |
| 2455 | PM 76- | artificial | DYYMY |
| | B10.11 CC- | | |
| | HCDR1 | | |
| 2456 | PM 76- | artificial | IISDGGYYTYYSDIIKG |
| | B10.11 CC- | | |
| | HCDR2 | | |
| 2457 | PM 76- | artificial | GFPLLRHGAMDY |
| | B10.11 CC- | | |
| | HCDR3 | | |
| 2458 | PM 76- | artificial | KASQNVDTNVA |
| | B10.11 CC- | | |
| | LCDR1 | | |
| 2459 | PM 76- | artificial | SASYVYW |
| | B10.11 CC- | | |
| | LCDR2 | | |
| 2460 | PM 76- | artificial | QQYDQQLIT |
| | B10.11 CC- | | |
| | LCDR3 | | |
| 2461 | PM 76- | artificial | QVQLVESGGGLVKPGESLRLSCAASGFTFSDYYMYWVRQAPGKCLEWVAIISDGGYYT |
| | B10.11 CC- | | YYSDIIKGRFTISRDNAKNSLYLQMNSLKAEDTAVYYCARGFPLLRHGAMDYWGQGTL |
| | VH | | VTVSS |
| 2462 | PM 76- | artificial | DIQMTQSPSSLSASVGDRVTITCKASQNVDTNVAWYQQKPGQAPKSLIYSASYVYWDV |
| | B10.11 CC- | | PSRFSGSASGTDFTLTISSVQSEDFATYYCQQYDQQLITFGCGTKLEIK |
| | VL | | |
| 2463 | PM 76- | artificial | EIQMTQSPSSLSASVGDRVTITCKASQNVDTNVAWYQQKPGQAPKSLIYSASYVYWDV |
| | B10.11 CC | | PSRFSGSASGTDFTLTISSVQSEDFATYYCQQYDQQLITFGCGTKLEIK |
| | EI GQ-VL | | |
| 2464 | PM 76-B10x | artificial | QVQLVESGGGLVKPGESLRLSCAASGFTFSDYYMYWVRQAPGKGLEWVAIISDGGYYT |
| | I2C-Full | | YYSDIIKGRFTISRDNAKNSLYLQMNSLKAEDTAVYYCARGFPLLRHGAMDYWGQGTL |
| | Sequence | | VTVSSGGGGSGGGGSGGGGSDIQMTQSPSSLSASVGDRVTITCKASQNVDTNVAWYQQ |
| | | | KPGQAPKSLIYSASYRYSDVPSRFSGSASGTDFTLTISSVQSEDFATYYCQQYDSYPY |
| | | | TFGGGTKLEIKSGGGGSEVQLVESGGGLVQPGGSLKLSCAASGFTENKYAMNWVRQAP |
| | | | GKGLEWVARIRSKYNNYATYYADSVKDRFTISRDDSKNTAYLQMNNLKTEDTAVYYCV |
| | | | RHGNFGNSYISYWAYWGQGTLVTVSSGGGGSGGGGSGGGGSQTVVTQEPSLTVSPGGT |
| | | | VTLTCGSSTGAVTSGNYPNWVQQKPGQAPRGLIGGTKFLAPGTPARFSGSLLGGKAAL |
| | | | TLSGVQPEDEAEYYCVLWYSNRWVFGGGTKLTVL |
| 2465 | PM 76-B10x | artificial | QVQLVESGGGLVKPGESLRLSCAASGFTFSDYYMYWVRQAPGKGLEWVAIISDGGYYT |
| | I2E-Full | | YYSDIIKGRFTISRDNAKNSLYLQMNSLKAEDTAVYYCARGFPLLRHGAMDYWGQGTL |
| | Sequence | | VTVSSGGGGSGGGGSGGGGSDIQMTQSPSSLSASVGDRVTITCKASQNVDTNVAWYQQ |
| | | | KPGQAPKSLIYSASYRYSDVPSRFSGSASGTDFTLTISSVQSEDFATYYCQQYDSYPY |
| | | | TFGGGTKLEIKSGGGGSEVQLVESGGGLVQPGGSLKLSCAASGFTENKYAINWVRQAP |
| | | | GKGLEWVARIRSKYNNYATYYADAVKDRFTISRDDSKNTVYLQMNNLKTEDTAVYYCA |
| | | | RAGNFGSSYISYWAYWGQGTLVTVSSGGGGSGGGGSGGGGSQTVVTQEPSLTVSPGGT |
| | | | VTITCGSSTGAVTSGNYPNWVQKKPGQAPRGLIGGTKFLAPGTPARFSGSLSGGKAAL |
| | | | TLSGVQPEDEAEYYCVLWYSNRWVFGSGTKLTVL |
| 2466 | PM 76-B10x | artificial | QVQLVESGGGLVKPGESLRLSCAASGFTFSDYYMYWVRQAPGKGLEWVAIISDGGYYT |
| | I2K-Full | | YYSDIIKGRFTISRDNAKNSLYLQMNSLKAEDTAVYYCARGFPLLRHGAMDYWGQGTL |
| | Sequence | | VTVSSGGGGSGGGGSGGGGSDIQMTQSPSSLSASVGDRVTITCKASQNVDTNVAWYQQ |
| | | | KPGQAPKSLIYSASYRYSDVPSRFSGSASGTDFTLTISSVQSEDFATYYCQQYDSYPY |
| | | | TFGGGTKLEIKSGGGGSEVQLVESGGGLVQPGGSLKLSCAASGFTFNKYAMNWVRQAP |
| | | | GKGLEWVARIRSKYNNYATYYAEAVKGRFTISRDDSKNTVYLQMNNLKTEDTAVYYCV |
| | | | RNENIGTSYISYWAYWGQGTLVTVSSGGGGSGGGGSGGGGSQTVVTQEPSLTVSPGGT |
| | | | VTITCGSSTGAVTSGNYPNWVQQKPGQAPRGLIGGTKFLAPGTPARFSGSLSGGKAAL |
| | | | TLSGVQPEDEAEYYCVLWYSNRWVFGSGTKLTVL |
| 2467 | PM 76-B10x | artificial | QVQLVESGGGLVKPGESLRLSCAASGFTFSDYYMYWVRQAPGKGLEWVAIISDGGYYT |
| | I2L-Full | | YYSDIIKGRFTISRDNAKNSLYLQMNSLKAEDTAVYYCARGFPLLRHGAMDYWGQGTL |
| | Sequence | | VTVSSGGGGSGGGGSGGGGSDIQMTQSPSSLSASVGDRVTITCKASQNVDTNVAWYQQ |
| | | | KPGQAPKSLIYSASYRYSDVPSRFSGSASGTDFTLTISSVQSEDFATYYCQQYDSYPY |
| | | | TFGGGTKLEIKSGGGGSEVQLVESGGGLVQPGGSLKLSCAASGFTENKYAMNWVRQAP |
| | | | GKGMEWVARIRSKYNNYATYYADAVKDRFTISRDDSKNTLYLQMNNLKTEDTAVYYCV |
| | | | RAGNFGSSYISYFAYWGQGTLVTVSSGGGGSGGGGSGGGGSQTVVTQEPSLTVSPGGT |
| | | | VTITCGSSTGAVTSGNYPNWIQKKPGQAPRGLIGGTKFLAPGTPARFSGSLEGGKAAL |
| | | | TLSGVQPEDEAEYYCVLYYSNRWVFGSGTKLTVL |
| 2468 | PM 76-B10x | artificial | QVQLVESGGGLVKPGESLRLSCAASGFTFSDYYMYWVRQAPGKGLEWVAIISDGGYYT |
| | I2M-Full | | YYSDIIKGRFTISRDNAKNSLYLQMNSLKAEDTAVYYCARGFPLLRHGAMDYWGQGTL |
| | Sequence | | VTVSSGGGGSGGGGSGGGGSDIQMTQSPSSLSASVGDRVTITCKASQNVDTNVAWYQQ |
| | | | KPGQAPKSLIYSASYRYSDVPSRFSGSASGTDFTLTISSVQSEDFATYYCQQYDSYPY |
| | | | TFGGGTKLEIKSGGGGSEVQLVESGGGLVQPGGSLKLSCAASGFTFNKYAMNWVRQAP |
| | | | GKGMEWVARIRSKYNNYATYYADAVKDRFTISRDDSKNTLYLQMNNLKTEDTAVYYCV |
| | | | RAGNFGTSYISYWAYWGQGTLVTVSSGGGGSGGGGSGGGGSQTVVTQEPSLTVSPGGT |
| | | | VTITCGSSTGAVTSGNYPNWVQKKPGQAPRGLIGGTKFLAPGTPARFSGSLSGGKAAL |
| | | | TLSGVQPEDEAEYYCVLWYSNRWVFGSGTKLTVL |
| 2469 | PM 76-B10x | artificial | QVQLVESGGGLVKPGESLRLSCAASGFTFSDYYMYWVRQAPGKGLEWVAIISDGGYYT |
| | I2M2-Full | | YYSDIIKGRFTISRDNAKNSLYLQMNSLKAEDTAVYYCARGFPLLRHGAMDYWGQGTL |
| | Sequence | | VTVSSGGGGSGGGGSGGGGSDIQMTQSPSSLSASVGDRVTITCKASQNVDTNVAWYQQ |
| | | | KPGQAPKSLIYSASYRYSDVPSRFSGSASGTDFTLTISSVQSEDFATYYCQQYDSYPY |
| | | | TFGGGTKLEIKSGGGGSEVQLVESGGGLVQPGGSLKLSCAASGFTENKYAINWVREAP |
| | | | GKGLEWVARIRSKYNNYATYYADAVKDRFTISRDDSKNTAYLQMNNLKTEDTAVYYCV |
| | | | RNANFGTSYISYFAYWGQGTLVTVSSGGGGSGGGGSGGGGSQTVVTQEPSLTVSPGGT |
| | | | VTLTCGSSTGAVTSGNYPNWVQKKPGQAPRGLIGGTKFLAPGTPARFSGSLLGGKAAL |
| | | | TLSGVQPEDEAEYYCVLWYSNRWVFGSGTKLTVL |
| 2470 | PM 76- | artificial | QVQLVESGGGLVKPGESLRLSCAASGFTFSDYYMYWVRQAPGKCLEWVAIISDGGYYT |
| | B10.11 CC x | | YYSDIIKGRFTISRDNAKNSLYLQMNSLKAEDTAVYYCARGFPLLRHGAMDYWGQGTL |
| | I2C x scFc | | VTVSSGGGGSGGGGSGGGGSDIQMTQSPSSLSASVGDRVTITCKASQNVDTNVAWYQQ |
| | -Full | | KPGQAPKSLIYSASYVYWDVPSRFSGSASGTDFTLTISSVQSEDFATYYCQQYDQQLI |
| | Sequence | | TFGCGTKLEIKSGGGGSEVQLVESGGGLVQPGGSLKLSCAASGFTFNKYAMNWVRQAP |
| | | | GKGLEWVARIRSKYNNYATYYADSVKDRFTISRDDSKNTAYLQMNNLKTEDTAVYYCV |
| | | | RHGNFGNSYISYWAYWGQGTLVTVSSGGGGSGGGGSGGGGSQTVVTQEPSLTVSPGGT |
| | | | VTLTCGSSTGAVTSGNYPNWVQQKPGQAPRGLIGGTKFLAPGTPARFSGSLLGGKAAL |
| | | | TLSGVQPEDEAEYYCVLWYSNRWVFGGGTKLTVLGGGGDKTHTCPPCPAPELLGGPSV |
| | | | FLFPPKPKDTLMISRTPEVTCVVVDVSHEDPEVKFNWYVDGVEVHNAKTKPCEEQYGS |
| | | | TYRCVSVLTVLHQDWLNGKEYKCKVSNKALPAPIEKTISKAKGQPREPQVYTLPPSRE |
| | | | EMTKNQVSLTCLVKGFYPSDIAVEWESNGQPENNYKTTPPVLDSDGSFFLYSKLTVDK |
| | | | SRWQQGNVFSCSVMHEALHNHYTQKSLSLSPGKGGGGSGGGGSGGGGSGGGGSGGGGS |
| | | | GGGGSDKTHTCPPCPAPELLGGPSVFLFPPKPKDTLMISRTPEVTCVVVDVSHEDPEV |
| | | | KFNWYVDGVEVHNAKTKPCEEQYGSTYRCVSVLTVLHQDWLNGKEYKCKVSNKALPAP |
| | | | IEKTISKAKGQPREPQVYTLPPSREEMTKNQVSLTCLVKGFYPSDIAVEWESNGQPEN |
| | | | NYKTTPPVLDSDGSFFLYSKLTVDKSRWQQGNVFSCSVMHEALHNHYTQKSLSLSPGK |
| 2471 | PM 76- | artificial | QVQLVESGGGLVKPGESLRLSCAASGFTFSDYYMYWVRQAPGKCLEWVAIISDGGYYT |
| | B10.11 CC x | | YYSDIIKGRFTISRDNAKNSLYLQMNSLKAEDTAVYYCARGFPLLRHGAMDYWGQGTL |
| | I2E x scFc | | VTVSSGGGGSGGGGSGGGGSDIQMTQSPSSLSASVGDRVTITCKASQNVDTNVAWYQQ |
| | -Full | | KPGQAPKSLIYSASYVYWDVPSRFSGSASGTDFTLTISSVQSEDFATYYCQQYDQQLI |
| | Sequence | | TFGCGTKLEIKSGGGGSEVQLVESGGGLVQPGGSLKLSCAASGFTENKYAINWVRQAP |
| | | | GKGLEWVARIRSKYNNYATYYADAVKDRFTISRDDSKNTVYLQMNNLKTEDTAVYYCA |
| | | | RAGNFGSSYISYWAYWGQGTLVTVSSGGGGSGGGGSGGGGSQTVVTQEPSLTVSPGGT |
| | | | VTITCGSSTGAVTSGNYPNWVQKKPGQAPRGLIGGTKFLAPGTPARFSGSLSGGKAAL |
| | | | TLSGVQPEDEAEYYCVLWYSNRWVFGSGTKLTVLGGGGDKTHTCPPCPAPELLGGPSV |
| | | | FLFPPKPKDTLMISRTPEVTCVVVDVSHEDPEVKFNWYVDGVEVHNAKTKPCEEQYGS |
| | | | TYRCVSVLTVLHQDWLNGKEYKCKVSNKALPAPIEKTISKAKGQPREPQVYTLPPSRE |
| | | | EMTKNQVSLTCLVKGFYPSDIAVEWESNGQPENNYKTTPPVLDSDGSFFLYSKLTVDK |
| | | | SRWQQGNVFSCSVMHEALHNHYTQKSLSLSPGKGGGGSGGGGSGGGGSGGGGSGGGGS |
| | | | GGGGSDKTHTCPPCPAPELLGGPSVFLFPPKPKDTLMISRTPEVTCVVVDVSHEDPEV |
| | | | KFNWYVDGVEVHNAKTKPCEEQYGSTYRCVSVLTVLHQDWLNGKEYKCKVSNKALPAP |
| | | | IEKTISKAKGQPREPQVYTLPPSREEMTKNQVSLTCLVKGFYPSDIAVEWESNGQPEN |
| | | | NYKTTPPVLDSDGSFFLYSKLTVDKSRWQQGNVFSCSVMHEALHNHYTQKSLSLSPGK |
| 2472 | PM 76- | artificial | QVQLVESGGGLVKPGESLRLSCAASGFTFSDYYMYWVRQAPGKCLEWVAIISDGGYYT |
| | B10.11 CC x | | YYSDIIKGRFTISRDNAKNSLYLQMNSLKAEDTAVYYCARGFPLLRHGAMDYWGQGTL |
| | I2K x scFc | | VTVSSGGGGSGGGGSGGGGSDIQMTQSPSSLSASVGDRVTITCKASQNVDTNVAWYQQ |
| | -Full | | KPGQAPKSLIYSASYVYWDVPSRFSGSASGTDFTLTISSVQSEDFATYYCQQYDQQLI |
| | Sequence | | TFGCGTKLEIKSGGGGSEVQLVESGGGLVQPGGSLKLSCAASGFTFNKYAMNWVRQAP |
| | | | GKGLEWVARIRSKYNNYATYYAEAVKGRFTISRDDSKNTVYLQMNNLKTEDTAVYYCV |
| | | | RNENIGTSYISYWAYWGQGTLVTVSSGGGGSGGGGSGGGGSQTVVTQEPSLTVSPGGT |
| | | | VTITCGSSTGAVTSGNYPNWVQQKPGQAPRGLIGGTKFLAPGTPARFSGSLSGGKAAL |
| | | | TLSGVQPEDEAEYYCVLWYSNRWVFGSGTKLTVLGGGGDKTHTCPPCPAPELLGGPSV |
| | | | FLFPPKPKDTLMISRTPEVTCVVVDVSHEDPEVKENWYVDGVEVHNAKTKPCEEQYGS |
| | | | TYRCVSVLTVLHQDWLNGKEYKCKVSNKALPAPIEKTISKAKGQPREPQVYTLPPSRE |
| | | | EMTKNQVSLTCLVKGFYPSDIAVEWESNGQPENNYKTTPPVLDSDGSFFLYSKLTVDK |
| | | | SRWQQGNVFSCSVMHEALHNHYTQKSLSLSPGKGGGGSGGGGSGGGGSGGGGSGGGGS |
| | | | GGGGSDKTHTCPPCPAPELLGGPSVFLFPPKPKDTLMISRTPEVTCVVVDVSHEDPEV |
| | | | KFNWYVDGVEVHNAKTKPCEEQYGSTYRCVSVLTVLHQDWLNGKEYKCKVSNKALPAP |
| | | | IEKTISKAKGQPREPQVYTLPPSREEMTKNQVSLTCLVKGFYPSDIAVEWESNGQPEN |
| | | | NYKTTPPVLDSDGSFFLYSKLTVDKSRWQQGNVFSCSVMHEALHNHYTQKSLSLSPGK |
| 2473 | PM 76- | artificial | QVQLVESGGGLVKPGESLRLSCAASGFTFSDYYMYWVRQAPGKCLEWVAIISDGGYYT |
| | B10.11 CC x | | YYSDIIKGRFTISRDNAKNSLYLQMNSLKAEDTAVYYCARGFPLLRHGAMDYWGQGTL |
| | I2L x scFc | | VTVSSGGGGSGGGGSGGGGSDIQMTQSPSSLSASVGDRVTITCKASQNVDTNVAWYQQ |
| | -Full | | KPGQAPKSLIYSASYVYWDVPSRFSGSASGTDFTLTISSVQSEDFATYYCQQYDQQLI |
| | Sequence | | TFGCGTKLEIKSGGGGSEVQLVESGGGLVQPGGSLKLSCAASGFTFNKYAMNWVRQAP |
| | | | GKGMEWVARIRSKYNNYATYYADAVKDRFTISRDDSKNTLYLQMNNLKTEDTAVYYCV |
| | | | RAGNFGSSYISYFAYWGQGTLVTVSSGGGGSGGGGSGGGGSQTVVTQEPSLTVSPGGT |
| | | | VTITCGSSTGAVTSGNYPNWIQKKPGQAPRGLIGGTKFLAPGTPARFSGSLEGGKAAL |
| | | | TLSGVQPEDEAEYYCVLYYSNRWVFGSGTKLTVLGGGGDKTHTCPPCPAPELLGGPSV |
| | | | FLFPPKPKDTLMISRTPEVTCVVVDVSHEDPEVKENWYVDGVEVHNAKTKPCEEQYGS |
| | | | TYRCVSVLTVLHQDWLNGKEYKCKVSNKALPAPIEKTISKAKGQPREPQVYTLPPSRE |
| | | | EMTKNQVSLTCLVKGFYPSDIAVEWESNGQPENNYKTTPPVLDSDGSFFLYSKLTVDK |
| | | | SRWQQGNVFSCSVMHEALHNHYTQKSLSLSPGKGGGGSGGGGSGGGGSGGGGSGGGGS |
| | | | GGGGSDKTHTCPPCPAPELLGGPSVFLFPPKPKDTLMISRTPEVTCVVVDVSHEDPEV |
| | | | KFNWYVDGVEVHNAKTKPCEEQYGSTYRCVSVLTVLHQDWLNGKEYKCKVSNKALPAP |
| | | | IEKTISKAKGQPREPQVYTLPPSREEMTKNQVSLTCLVKGFYPSDIAVEWESNGQPEN |
| | | | NYKTTPPVLDSDGSFFLYSKLTVDKSRWQQGNVFSCSVMHEALHNHYTQKSLSLSPGK |
| 2474 | PM 76- | artificial | QVQLVESGGGLVKPGESLRLSCAASGFTFSDYYMYWVRQAPGKCLEWVAIISDGGYYT |
| | B10.11 CC x | | YYSDIIKGRFTISRDNAKNSLYLQMNSLKAEDTAVYYCARGFPLLRHGAMDYWGQGTL |
| | I2M x scFc | | VTVSSGGGGSGGGGSGGGGSDIQMTQSPSSLSASVGDRVTITCKASQNVDTNVAWYQQ |
| | -Full | | KPGQAPKSLIYSASYVYWDVPSRFSGSASGTDFTLTISSVQSEDFATYYCQQYDQQLI |
| | Sequence | | TFGCGTKLEIKSGGGGSEVQLVESGGGLVQPGGSLKLSCAASGFTENKYAMNWVRQAP |
| | | | GKGMEWVARIRSKYNNYATYYADAVKDRFTISRDDSKNTLYLQMNNLKTEDTAVYYCV |
| | | | RAGNFGTSYISYWAYWGQGTLVTVSSGGGGSGGGGSGGGGSQTVVTQEPSLTVSPGGT |
| | | | VTITCGSSTGAVTSGNYPNWVQKKPGQAPRGLIGGTKFLAPGTPARFSGSLSGGKAAL |
| | | | TLSGVQPEDEAEYYCVLWYSNRWVFGSGTKLTVLGGGGDKTHTCPPCPAPELLGGPSV |
| | | | FLFPPKPKDTLMISRTPEVTCVVVDVSHEDPEVKFNWYVDGVEVHNAKTKPCEEQYGS |
| | | | TYRCVSVLTVLHQDWLNGKEYKCKVSNKALPAPIEKTISKAKGQPREPQVYTLPPSRE |
| | | | EMTKNQVSLTCLVKGFYPSDIAVEWESNGQPENNYKTTPPVLDSDGSFFLYSKLTVDK |
| | | | SRWQQGNVFSCSVMHEALHNHYTQKSLSLSPGKGGGGSGGGGSGGGGSGGGGSGGGGS |
| | | | GGGGSDKTHTCPPCPAPELLGGPSVFLFPPKPKDTLMISRTPEVTCVVVDVSHEDPEV |
| | | | KFNWYVDGVEVHNAKTKPCEEQYGSTYRCVSVLTVLHQDWLNGKEYKCKVSNKALPAP |
| | | | IEKTISKAKGQPREPQVYTLPPSREEMTKNQVSLTCLVKGFYPSDIAVEWESNGQPEN |
| | | | NYKTTPPVLDSDGSFFLYSKLTVDKSRWQQGNVFSCSVMHEALHNHYTQKSLSLSPGK |
| 2475 | PM 76- | artificial | QVQLVESGGGLVKPGESLRLSCAASGFTFSDYYMYWVRQAPGKCLEWVAIISDGGYYT |
| | B10.11 CC x | | YYSDIIKGRFTISRDNAKNSLYLQMNSLKAEDTAVYYCARGFPLLRHGAMDYWGQGTL |
| | I2M2 x scFc | | VTVSSGGGGSGGGGSGGGGSDIQMTQSPSSLSASVGDRVTITCKASQNVDTNVAWYQQ |
| | -Full | | KPGQAPKSLIYSASYVYWDVPSRFSGSASGTDFTLTISSVQSEDFATYYCQQYDQQLI |
| | Sequence | | TFGCGTKLEIKSGGGGSEVQLVESGGGLVQPGGSLKLSCAASGFTENKYAINWVREAP |
| | | | GKGLEWVARIRSKYNNYATYYADAVKDRFTISRDDSKNTAYLQMNNLKTEDTAVYYCV |
| | | | RNANFGTSYISYFAYWGQGTLVTVSSGGGGSGGGGSGGGGSQTVVTQEPSLTVSPGGT |
| | | | VTLTCGSSTGAVTSGNYPNWVQKKPGQAPRGLIGGTKFLAPGTPARFSGSLLGGKAAL |
| | | | TLSGVQPEDEAEYYCVLWYSNRWVFGSGTKLTVLGGGGDKTHTCPPCPAPELLGGPSV |
| | | | FLFPPKPKDTLMISRTPEVTCVVVDVSHEDPEVKENWYVDGVEVHNAKTKPCEEQYGS |
| | | | TYRCVSVLTVLHQDWLNGKEYKCKVSNKALPAPIEKTISKAKGQPREPQVYTLPPSRE |
| | | | EMTKNQVSLTCLVKGFYPSDIAVEWESNGQPENNYKTTPPVLDSDGSFFLYSKLTVDK |
| | | | SRWQQGNVFSCSVMHEALHNHYTQKSLSLSPGKGGGGSGGGGSGGGGSGGGGSGGGGS |
| | | | GGGGSDKTHTCPPCPAPELLGGPSVFLFPPKPKDTLMISRTPEVTCVVVDVSHEDPEV |
| | | | KFNWYVDGVEVHNAKTKPCEEQYGSTYRCVSVLTVLHQDWLNGKEYKCKVSNKALPAP |
| | | | IEKTISKAKGQPREPQVYTLPPSREEMTKNQVSLTCLVKGFYPSDIAVEWESNGQPEN |
| | | | NYKTTPPVLDSDGSFFLYSKLTVDKSRWQQGNVFSCSVMHEALHNHYTQKSLSLSPGK |
| 2505 | CD20 99-E5 | artificial | QVQLVQSGAEVKKPGASVKVSCKASGYTFTSYWMHWVRQAPGQCLEWIGYITPSTGYT |
| | CC x CD22 | | EYNQKFKGRVTMTRDKSTSTVYMELSSLTSEDTAVYYCARVHDYDRAMEYWGQGTTVT |
| | 28-B7 N65S | | VSSGGGGSGGGGSGGGGSDIQMTQSPSSLSASVGDRVTITCKASQDINKYIAWYQQKP |
| | CC x I2C x | | GKGPKLLIYYTSTLQPGVPSRFSGSGSGTDFTFTISSLQPEDIATYYCLQYASYPFTF |
| | scFc-Full | | GCGTRLEIKSGGGGSQVQLVQSGAEVKKPGASVKVSCKASGYTFTSYGISWVRQAPGQ |
| | Sequence | | CLEWMGWISAYSGNAIYAQKLQGRVTMTRDTSTSTAYMELRSLRSDDTAVYYCARDPD |
| | | | YYGSGSYSDYWGQGTLVTVSSGGGGSGGGGSGGGGSEIVLTQSPATLSVSPGERATLS |
| | | | CRASQSVSSNLAWYQQKPGQAPRLLIYGASSRATGIPARFSGSGSGTEFTLTISSLQS |
| | | | EDFAVYYCQQYHSWPLLTFGCGTKVEIKSGGGGSEVQLVESGGGLVQPGGSLKLSCAA |
| | | | SGFTFNKYAMNWVRQAPGKGLEWVARIRSKYNNYATYYADSVKDRFTISRDDSKNTAY |
| | | | LQMNNLKTEDTAVYYCVRHGNFGNSYISYWAYWGQGTLVTVSSGGGGSGGGGSGGGGS |
| | | | QTVVTQEPSLTVSPGGTVTLTCGSSTGAVTSGNYPNWVQQKPGQAPRGLIGGTKFLAP |
| | | | GTPARFSGSLLGGKAALTLSGVQPEDEAEYYCVLWYSNRWVFGGGTKLTVLGGGGDKT |
| | | | HTCPPCPAPELLGGPSVFLFPPKPKDTLMISRTPEVTCVVVDVSHEDPEVKFNWYVDG |
| | | | VEVHNAKTKPCEEQYGSTYRCVSVLTVLHQDWLNGKEYKCKVSNKALPAPIEKTISKA |
| | | | KGQPREPQVYTLPPSREEMTKNQVSLTCLVKGFYPSDIAVEWESNGQPENNYKTTPPV |
| | | | LDSDGSFFLYSKLTVDKSRWQQGNVFSCSVMHEALHNHYTQKSLSLSPGKGGGGSGGG |
| | | | GSGGGGSGGGGSGGGGSGGGGSDKTHTCPPCPAPELLGGPSVFLFPPKPKDTLMISRT |
| | | | PEVTCVVVDVSHEDPEVKFNWYVDGVEVHNAKTKPCEEQYGSTYRCVSVLTVLHQDWL |
| | | | NGKEYKCKVSNKALPAPIEKTISKAKGQPREPQVYTLPPSREEMTKNQVSLTCLVKGF |
| | | | YPSDIAVEWESNGQPENNYKTTPPVLDSDGSFFLYSKLTVDKSRWQQGNVFSCSVMHE |
| | | | ALHNHYTQKSLSLSPGK |
| 2506 | CD20 99-E5 | artificial | QVQLVQSGAEVKKPGASVKVSCKASGYTFTSYWMHWVRQAPGQCLEWIGYITPSTGYT |
| | CC x CD22 | | EYNQKFKGRVTMTRDKSTSTVYMELSSLTSEDTAVYYCARVHDYDRAMEYWGQGTTVT |
| | 28-B7 N65S | | VSSGGGGSGGGGSGGGGSDIQMTQSPSSLSASVGDRVTITCKASQDINKYIAWYQQKP |
| | CC x I2E x | | GKGPKLLIYYTSTLQPGVPSRFSGSGSGTDFTFTISSLQPEDIATYYCLQYASYPFTF |
| | scFc-Full | | GCGTRLEIKSGGGGSQVQLVQSGAEVKKPGASVKVSCKASGYTFTSYGISWVRQAPGQ |
| | Sequence | | CLEWMGWISAYSGNAIYAQKLQGRVTMTRDTSTSTAYMELRSLRSDDTAVYYCARDPD |
| | | | YYGSGSYSDYWGQGTLVTVSSGGGGSGGGGSGGGGSEIVLTQSPATLSVSPGERATLS |
| | | | CRASQSVSSNLAWYQQKPGQAPRLLIYGASSRATGIPARFSGSGSGTEFTLTISSLQS |
| | | | EDFAVYYCQQYHSWPLLTFGCGTKVEIKSGGGGSEVQLVESGGGLVQPGGSLKLSCAA |
| | | | SGFTFNKYAINWVRQAPGKGLEWVARIRSKYNNYATYYADAVKDRFTISRDDSKNTVY |
| | | | LQMNNLKTEDTAVYYCARAGNFGSSYISYWAYWGQGTLVTVSSGGGGSGGGGSGGGGS |
| | | | QTVVTQEPSLTVSPGGTVTITCGSSTGAVTSGNYPNWVQKKPGQAPRGLIGGTKFLAP |
| | | | GTPARFSGSLSGGKAALTLSGVQPEDEAEYYCVLWYSNRWVFGSGTKLTVLGGGGDKT |
| | | | HTCPPCPAPELLGGPSVFLFPPKPKDTLMISRTPEVTCVVVDVSHEDPEVKENWYVDG |
| | | | VEVHNAKTKPCEEQYGSTYRCVSVLTVLHQDWLNGKEYKCKVSNKALPAPIEKTISKA |
| | | | KGQPREPQVYTLPPSREEMTKNQVSLTCLVKGFYPSDIAVEWESNGQPENNYKTTPPV |
| | | | LDSDGSFFLYSKLTVDKSRWQQGNVFSCSVMHEALHNHYTQKSLSLSPGKGGGGSGGG |
| | | | GSGGGGSGGGGSGGGGSGGGGSDKTHTCPPCPAPELLGGPSVFLFPPKPKDTLMISRT |
| | | | PEVTCVVVDVSHEDPEVKFNWYVDGVEVHNAKTKPCEEQYGSTYRCVSVLTVLHQDWL |
| | | | NGKEYKCKVSNKALPAPIEKTISKAKGQPREPQVYTLPPSREEMTKNQVSLTCLVKGF |
| | | | YPSDIAVEWESNGQPENNYKTTPPVLDSDGSFFLYSKLTVDKSRWQQGNVFSCSVMHE |
| | | | ALHNHYTQKSLSLSPGK |
| | | | QVQLVQSGAEVKKPGASVKVSCKASGYTFTSYWMHWVRQAPGQCLEWIGYITPSTGYT |
| 2507 | CD20 99-E5 | artificial | EYNQKFKGRVTMTRDKSTSTVYMELSSLTSEDTAVYYCARVHDYDRAMEYWGQGTTVT |
| | CC x CD22 | | VSSGGGGSGGGGSGGGGSDIQMTQSPSSLSASVGDRVTITCKASQDINKYIAWYQQKP |
| | 28-B7 N65S | | GKGPKLLIYYTSTLQPGVPSRFSGSGSGTDFTFTISSLQPEDIATYYCLQYASYPFTF |
| | CC x I2K x | | GCGTRLEIKSGGGGSQVQLVQSGAEVKKPGASVKVSCKASGYTFTSYGISWVRQAPGQ |
| | scFc-Full | | CLEWMGWISAYSGNAIYAQKLQGRVTMTRDTSTSTAYMELRSLRSDDTAVYYCARDPD |
| | Sequence | | YYGSGSYSDYWGQGTLVTVSSGGGGSGGGGSGGGGSEIVLTQSPATLSVSPGERATLS |
| | | | CRASQSVSSNLAWYQQKPGQAPRLLIYGASSRATGIPARFSGSGSGTEFTLTISSLQS |
| | | | EDFAVYYCQQYHSWPLLTFGCGTKVEIKSGGGGSEVQLVESGGGLVQPGGSLKLSCAA |
| | | | SGFTFNKYAMNWVRQAPGKGLEWVARIRSKYNNYATYYAEAVKGRFTISRDDSKNTVY |
| | | | LQMNNLKTEDTAVYYCVRNENIGTSYISYWAYWGQGTLVTVSSGGGGSGGGGSGGGGS |
| | | | QTVVTQEPSLTVSPGGTVTITCGSSTGAVTSGNYPNWVQQKPGQAPRGLIGGTKFLAP |
| | | | GTPARFSGSLSGGKAALTLSGVQPEDEAEYYCVLWYSNRWVFGSGTKLTVLGGGGDKT |
| | | | HTCPPCPAPELLGGPSVFLFPPKPKDTLMISRTPEVTCVVVDVSHEDPEVKFNWYVDG |
| | | | VEVHNAKTKPCEEQYGSTYRCVSVLTVLHQDWLNGKEYKCKVSNKALPAPIEKTISKA |
| | | | KGQPREPQVYTLPPSREEMTKNQVSLTCLVKGFYPSDIAVEWESNGQPENNYKTTPPV |
| | | | LDSDGSFFLYSKLTVDKSRWQQGNVFSCSVMHEALHNHYTQKSLSLSPGKGGGGSGGG |
| | | | GSGGGGSGGGGSGGGGSGGGGSDKTHTCPPCPAPELLGGPSVFLFPPKPKDTLMISRT |
| | | | PEVTCVVVDVSHEDPEVKFNWYVDGVEVHNAKTKPCEEQYGSTYRCVSVLTVLHQDWL |
| | | | NGKEYKCKVSNKALPAPIEKTISKAKGQPREPQVYTLPPSREEMTKNQVSLTCLVKGF |
| | | | YPSDIAVEWESNGQPENNYKTTPPVLDSDGSFFLYSKLTVDKSRWQQGNVFSCSVMHE |
| | | | ALHNHYTQKSLSLSPGK |
| | | | QVQLVQSGAEVKKPGASVKVSCKASGYTFTSYWMHWVRQAPGQCLEWIGYITPSTGYT |
| 2508 | CD20 99-E5 | artificial | EYNQKFKGRVTMTRDKSTSTVYMELSSLTSEDTAVYYCARVHDYDRAMEYWGQGTTVT |
| | CC x CD22 | | VSSGGGGSGGGGSGGGGSDIQMTQSPSSLSASVGDRVTITCKASQDINKYIAWYQQKP |
| | 28-B7 N65S | | GKGPKLLIYYTSTLQPGVPSRFSGSGSGTDFTFTISSLQPEDIATYYCLQYASYPFTF |
| | CC x I2L x | | GCGTRLEIKSGGGGSQVQLVQSGAEVKKPGASVKVSCKASGYTFTSYGISWVRQAPGQ |
| | scFc-Full | | CLEWMGWISAYSGNAIYAQKLQGRVTMTRDTSTSTAYMELRSLRSDDTAVYYCARDPD |
| | Sequence | | YYGSGSYSDYWGQGTLVTVSSGGGGSGGGGSGGGGSEIVLTQSPATLSVSPGERATLS |
| | | | CRASQSVSSNLAWYQQKPGQAPRLLIYGASSRATGIPARFSGSGSGTEFTLTISSLQS |
| | | | EDFAVYYCQQYHSWPLLTFGCGTKVEIKSGGGGSEVQLVESGGGLVQPGGSLKLSCAA |
| | | | SGFTFNKYAMNWVRQAPGKGMEWVARIRSKYNNYATYYADAVKDRFTISRDDSKNTLY |
| | | | LQMNNLKTEDTAVYYCVRAGNFGSSYISYFAYWGQGTLVTVSSGGGGSGGGGSGGGGS |
| | | | QTVVTQEPSLTVSPGGTVTITCGSSTGAVTSGNYPNWIQKKPGQAPRGLIGGTKFLAP |
| | | | GTPARFSGSLEGGKAALTLSGVQPEDEAEYYCVLYYSNRWVFGSGTKLTVLGGGGDKT |
| | | | HTCPPCPAPELLGGPSVFLFPPKPKDTLMISRTPEVTCVVVDVSHEDPEVKENWYVDG |
| | | | VEVHNAKTKPCEEQYGSTYRCVSVLTVLHQDWLNGKEYKCKVSNKALPAPIEKTISKA |
| | | | KGQPREPQVYTLPPSREEMTKNQVSLTCLVKGFYPSDIAVEWESNGQPENNYKTTPPV |
| | | | LDSDGSFFLYSKLTVDKSRWQQGNVFSCSVMHEALHNHYTQKSLSLSPGKGGGGSGGG |
| | | | GSGGGGSGGGGSGGGGSGGGGSDKTHTCPPCPAPELLGGPSVFLFPPKPKDTLMISRT |
| | | | PEVTCVVVDVSHEDPEVKFNWYVDGVEVHNAKTKPCEEQYGSTYRCVSVLTVLHQDWL |
| | | | NGKEYKCKVSNKALPAPIEKTISKAKGQPREPQVYTLPPSREEMTKNQVSLTCLVKGF |
| | | | YPSDIAVEWESNGQPENNYKTTPPVLDSDGSFFLYSKLTVDKSRWQQGNVFSCSVMHE |
| | | | ALHNHYTQKSLSLSPGK |
| 2509 | CD20 99-E5 | artificial | QVQLVQSGAEVKKPGASVKVSCKASGYTFTSYWMHWVRQAPGQCLEWIGYITPSTGYT |
| | CC x CD22 | | EYNQKFKGRVTMTRDKSTSTVYMELSSLTSEDTAVYYCARVHDYDRAMEYWGQGTTVT |
| | 28-B7 N65S | | VSSGGGGSGGGGSGGGGSDIQMTQSPSSLSASVGDRVTITCKASQDINKYIAWYQQKP |
| | CC x I2M x | | GKGPKLLIYYTSTLQPGVPSRFSGSGSGTDFTFTISSLQPEDIATYYCLQYASYPFTF |
| | scFc-Full | | GCGTRLEIKSGGGGSQVQLVQSGAEVKKPGASVKVSCKASGYTFTSYGISWVRQAPGQ |
| | Sequence | | CLEWMGWISAYSGNAIYAQKLQGRVTMTRDTSTSTAYMELRSLRSDDTAVYYCARDPD |
| | | | YYGSGSYSDYWGQGTLVTVSSGGGGSGGGGSGGGGSEIVLTQSPATLSVSPGERATLS |
| | | | CRASQSVSSNLAWYQQKPGQAPRLLIYGASSRATGIPARFSGSGSGTEFTLTISSLQS |
| | | | EDFAVYYCQQYHSWPLLTFGCGTKVEIKSGGGGSEVQLVESGGGLVQPGGSLKLSCAA |
| | | | SGFTFNKYAMNWVRQAPGKGMEWVARIRSKYNNYATYYADAVKDRFTISRDDSKNTLY |
| | | | LQMNNLKTEDTAVYYCVRAGNFGTSYISYWAYWGQGTLVTVSSGGGGSGGGGSGGGGS |
| | | | QTVVTQEPSLTVSPGGTVTITCGSSTGAVTSGNYPNWVQKKPGQAPRGLIGGTKFLAP |
| | | | GTPARFSGSLSGGKAALTLSGVQPEDEAEYYCVLWYSNRWVFGSGTKLTVLGGGGDKT |
| | | | HTCPPCPAPELLGGPSVFLFPPKPKDTLMISRTPEVTCVVVDVSHEDPEVKENWYVDG |
| | | | VEVHNAKTKPCEEQYGSTYRCVSVLTVLHQDWLNGKEYKCKVSNKALPAPIEKTISKA |
| | | | KGQPREPQVYTLPPSREEMTKNQVSLTCLVKGFYPSDIAVEWESNGQPENNYKTTPPV |
| | | | LDSDGSFFLYSKLTVDKSRWQQGNVFSCSVMHEALHNHYTQKSLSLSPGKGGGGSGGG |
| | | | GSGGGGSGGGGSGGGGSGGGGSDKTHTCPPCPAPELLGGPSVFLFPPKPKDTLMISRT |
| | | | PEVTCVVVDVSHEDPEVKFNWYVDGVEVHNAKTKPCEEQYGSTYRCVSVLTVLHQDWL |
| | | | NGKEYKCKVSNKALPAPIEKTISKAKGQPREPQVYTLPPSREEMTKNQVSLTCLVKGF |
| | | | YPSDIAVEWESNGQPENNYKTTPPVLDSDGSFFLYSKLTVDKSRWQQGNVFSCSVMHE |
| | | | ALHNHYTQKSLSLSPGK |
| 2510 | CD20 99-E5 | artificial | QVQLVQSGAEVKKPGASVKVSCKASGYTFTSYWMHWVRQAPGQCLEWIGYITPSTGYT |
| | CC x CD22 | | EYNQKFKGRVTMTRDKSTSTVYMELSSLTSEDTAVYYCARVHDYDRAMEYWGQGTTVT |
| | 28-B7 N65S | | VSSGGGGSGGGGSGGGGSDIQMTQSPSSLSASVGDRVTITCKASQDINKYIAWYQQKP |
| | CC x I2M2 x | | GKGPKLLIYYTSTLQPGVPSRFSGSGSGTDFTFTISSLQPEDIATYYCLQYASYPFTF |
| | scFc-Full | | GCGTRLEIKSGGGGSQVQLVQSGAEVKKPGASVKVSCKASGYTFTSYGISWVRQAPGQ |
| | Sequence | | CLEWMGWISAYSGNAIYAQKLQGRVTMTRDTSTSTAYMELRSLRSDDTAVYYCARDPD |
| | | | YYGSGSYSDYWGQGTLVTVSSGGGGSGGGGSGGGGSEIVLTQSPATLSVSPGERATLS |
| | | | CRASQSVSSNLAWYQQKPGQAPRLLIYGASSRATGIPARFSGSGSGTEFTLTISSLQS |
| | | | EDFAVYYCQQYHSWPLLTFGCGTKVEIKSGGGGSEVQLVESGGGLVQPGGSLKLSCAA |
| | | | SGFTFNKYAINWVREAPGKGLEWVARIRSKYNNYATYYADAVKDRFTISRDDSKNTAY |
| | | | LQMNNLKTEDTAVYYCVRNANFGTSYISYFAYWGQGTLVTVSSGGGGSGGGGSGGGGS |
| | | | QTVVTQEPSLTVSPGGTVTLTCGSSTGAVTSGNYPNWVQKKPGQAPRGLIGGTKFLAP |
| | | | GTPARFSGSLLGGKAALTLSGVQPEDEAEYYCVLWYSNRWVFGSGTKLTVLGGGGDKT |
| | | | HTCPPCPAPELLGGPSVFLFPPKPKDTLMISRTPEVTCVVVDVSHEDPEVKENWYVDG |
| | | | VEVHNAKTKPCEEQYGSTYRCVSVLTVLHQDWLNGKEYKCKVSNKALPAPIEKTISKA |
| | | | KGQPREPQVYTLPPSREEMTKNQVSLTCLVKGFYPSDIAVEWESNGQPENNYKTTPPV |
| | | | LDSDGSFFLYSKLTVDKSRWQQGNVFSCSVMHEALHNHYTQKSLSLSPGKGGGGSGGG |
| | | | GSGGGGSGGGGSGGGGSGGGGSDKTHTCPPCPAPELLGGPSVFLFPPKPKDTLMISRT |
| | | | PEVTCVVVDVSHEDPEVKFNWYVDGVEVHNAKTKPCEEQYGSTYRCVSVLTVLHQDWL |
| | | | NGKEYKCKVSNKALPAPIEKTISKAKGQPREPQVYTLPPSREEMTKNQVSLTCLVKGF |
| | | | YPSDIAVEWESNGQPENNYKTTPPVLDSDGSFFLYSKLTVDKSRWQQGNVFSCSVMHE |
| | | | ALHNHYTQKSLSLSPGK |
| 2511 | CD22 28- | artificial | QVQLVQSGAEVKKPGASVKVSCKASGYTFTSYGISWVRQAPGQCLEWMGWISAYSGNA |
| | B7N65S CC x | | IYAQKLQGRVTMTRDTSTSTAYMELRSLRSDDTAVYYCARDPDYYGSGSYSDYWGQGT |
| | I2C x | | LVTVSSGGGGSGGGGSGGGGSEIVLTQSPATLSVSPGERATLSCRASQSVSSNLAWYQ |
| | (G4S) 3 x | | QKPGQAPRLLIYGASSRATGIPARFSGSGSGTEFTLTISSLQSEDFAVYYCQQYHSWP |
| | scFc x | | LLTFGCGTKVEIKSGGGGSEVQLVESGGGLVQPGGSLKLSCAASGFTENKYAMNWVRQ |
| | (G4S) 3 x | | APGKGLEWVARIRSKYNNYATYYADSVKDRFTISRDDSKNTAYLQMNNLKTEDTAVYY |
| | CD20 99E5 | | CVRHGNFGNSYISYWAYWGQGTLVTVSSGGGGSGGGGSGGGGSQTVVTQEPSLTVSPG |
| | CC x I2C- | | GTVTLTCGSSTGAVTSGNYPNWVQQKPGQAPRGLIGGTKFLAPGTPARFSGSLLGGKA |
| | Full | | ALTLSGVQPEDEAEYYCVLWYSNRWVFGGGTKLTVLGGGGSGGGGSGGGGSDKTHTCP |
| | Sequence | | PCPAPELLGGPSVFLFPPKPKDTLMISRTPEVTCVVVDVSHEDPEVKFNWYVDGVEVH |
| | | | NAKTKPCEEQYGSTYRCVSVLTVLHQDWLNGKEYKCKVSNKALPAPIEKTISKAKGQP |
| | | | REPQVYTLPPSREEMTKNQVSLTCLVKGFYPSDIAVEWESNGQPENNYKTTPPVLDSD |
| | | | GSFFLYSKLTVDKSRWQQGNVFSCSVMHEALHNHYTQKSLSLSPGKGGGGSGGGGSGG |
| | | | GGSGGGGSGGGGSGGGGSDKTHTCPPCPAPELLGGPSVFLFPPKPKDTLMISRTPEVT |
| | | | CVVVDVSHEDPEVKFNWYVDGVEVHNAKTKPCEEQYGSTYRCVSVLTVLHQDWLNGKE |
| | | | YKCKVSNKALPAPIEKTISKAKGQPREPQVYTLPPSREEMTKNQVSLTCLVKGFYPSD |
| | | | IAVEWESNGQPENNYKTTPPVLDSDGSFFLYSKLTVDKSRWQQGNVFSCSVMHEALHN |
| | | | HYTQKSLSLSPGKGGGGSGGGGSGGGGSQVQLVQSGAEVKKPGASVKVSCKASGYTFT |
| | | | SYWMHWVRQAPGQCLEWIGYITPSTGYTEYNQKFKGRVTMTRDKSTSTVYMELSSLTS |
| | | | EDTAVYYCARVHDYDRAMEYWGQGTTVTVSSGGGGSGGGGSGGGGSDIQMTQSPSSLS |
| | | | ASVGDRVTITCKASQDINKYIAWYQQKPGKGPKLLIYYTSTLQPGVPSRFSGSGSGTD |
| | | | FTFTISSLQPEDIATYYCLQYASYPFTFGCGTRLEIKSGGGGSEVQLVESGGGLVQPG |
| | | | GSLKLSCAASGFTFNKYAMNWVRQAPGKGLEWVARIRSKYNNYATYYADSVKDRFTIS |
| | | | RDDSKNTAYLQMNNLKTEDTAVYYCVRHGNFGNSYISYWAYWGQGTLVTVSSGGGGSG |
| | | | GGGSGGGGSQTVVTQEPSLTVSPGGTVTLTCGSSTGAVTSGNYPNWVQQKPGQAPRGL |
| | | | IGGTKFLAPGTPARFSGSLLGGKAALTLSGVQPEDEAEYYCVLWYSNRWVFGGGTKLT |
| | | | VL |
| 2512 | CD22 28- | artificial | QVQLVQSGAEVKKPGASVKVSCKASGYTFTSYGISWVRQAPGQCLEWMGWISAYSGNA |
| | B7N65S CC x | | IYAQKLQGRVTMTRDTSTSTAYMELRSLRSDDTAVYYCARDPDYYGSGSYSDYWGQGT |
| | I2E x | | LVTVSSGGGGSGGGGSGGGGSEIVLTQSPATLSVSPGERATLSCRASQSVSSNLAWYQ |
| | (G4S ) 3 x | | QKPGQAPRLLIYGASSRATGIPARFSGSGSGTEFTLTISSLQSEDFAVYYCQQYHSWP |
| | ScFc x | | LLTFGCGTKVEIKSGGGGSEVQLVESGGGLVQPGGSLKLSCAASGFTFNKYAINWVRQ |
| | (G4S) 3 x | | APGKGLEWVARIRSKYNNYATYYADAVKDRFTISRDDSKNTVYLQMNNLKTEDTAVYY |
| | CD20 99E5 | | CARAGNFGSSYISYWAYWGQGTLVTVSSGGGGSGGGGSGGGGSQTVVTQEPSLTVSPG |
| | CC x I2E- | | GTVTITCGSSTGAVTSGNYPNWVQKKPGQAPRGLIGGTKFLAPGTPARFSGSLSGGKA |
| | Full | | ALTLSGVQPEDEAEYYCVLWYSNRWVFGSGTKLTVLGGGGSGGGGSGGGGSDKTHTCP |
| | Sequence | | PCPAPELLGGPSVFLFPPKPKDTLMISRTPEVTCVVVDVSHEDPEVKENWYVDGVEVH |
| | | | NAKTKPCEEQYGSTYRCVSVLTVLHQDWLNGKEYKCKVSNKALPAPIEKTISKAKGQP |
| | | | REPQVYTLPPSREEMTKNQVSLTCLVKGFYPSDIAVEWESNGQPENNYKTTPPVLDSD |
| | | | GSFFLYSKLTVDKSRWQQGNVFSCSVMHEALHNHYTQKSLSLSPGKGGGGSGGGGSGG |
| | | | GGSGGGGSGGGGSGGGGSDKTHTCPPCPAPELLGGPSVFLFPPKPKDTLMISRTPEVT |
| | | | CVVVDVSHEDPEVKFNWYVDGVEVHNAKTKPCEEQYGSTYRCVSVLTVLHQDWLNGKE |
| | | | YKCKVSNKALPAPIEKTISKAKGQPREPQVYTLPPSREEMTKNQVSLTCLVKGFYPSD |
| | | | IAVEWESNGQPENNYKTTPPVLDSDGSFFLYSKLTVDKSRWQQGNVFSCSVMHEALHN |
| | | | HYTQKSLSLSPGKGGGGSGGGGSGGGGSQVQLVQSGAEVKKPGASVKVSCKASGYTFT |
| | | | SYWMHWVRQAPGQCLEWIGYITPSTGYTEYNQKFKGRVTMTRDKSTSTVYMELSSLTS |
| | | | EDTAVYYCARVHDYDRAMEYWGQGTTVTVSSGGGGSGGGGSGGGGSDIQMTQSPSSLS |
| | | | ASVGDRVTITCKASQDINKYIAWYQQKPGKGPKLLIYYTSTLQPGVPSRFSGSGSGTD |
| | | | FTFTISSLQPEDIATYYCLQYASYPFTFGCGTRLEIKSGGGGSEVQLVESGGGLVQPG |
| | | | GSLKLSCAASGFTFNKYAINWVRQAPGKGLEWVARIRSKYNNYATYYADAVKDRFTIS |
| | | | RDDSKNTVYLQMNNLKTEDTAVYYCARAGNFGSSYISYWAYWGQGTLVTVSSGGGGSG |
| | | | GGGSGGGGSQTVVTQEPSLTVSPGGTVTITCGSSTGAVTSGNYPNWVQKKPGQAPRGL |
| | | | IGGTKFLAPGTPARFSGSLSGGKAALTLSGVQPEDEAEYYCVLWYSNRWVFGSGTKLT |
| | | | VL |
| 2513 | CD22 28- | artificial | QVQLVQSGAEVKKPGASVKVSCKASGYTFTSYGISWVRQAPGQCLEWMGWISAYSGNA |
| | B7N65S CC x | | IYAQKLQGRVTMTRDTSTSTAYMELRSLRSDDTAVYYCARDPDYYGSGSYSDYWGQGT |
| | I2K x | | LVTVSSGGGGSGGGGSGGGGSEIVLTQSPATLSVSPGERATLSCRASQSVSSNLAWYQ |
| | (G4S) 3 x | | QKPGQAPRLLIYGASSRATGIPARFSGSGSGTEFTLTISSLQSEDFAVYYCQQYHSWP |
| | ScFc x | | LLTFGCGTKVEIKSGGGGSEVQLVESGGGLVQPGGSLKLSCAASGFTFNKYAMNWVRQ |
| | (G4S) 3 x | | APGKGLEWVARIRSKYNNYATYYAEAVKGRFTISRDDSKNTVYLQMNNLKTEDTAVYY |
| | CD20 99E5 | | CVRNENIGTSYISYWAYWGQGTLVTVSSGGGGSGGGGSGGGGSQTVVTQEPSLTVSPG |
| | CC x I2K- | | GTVTITCGSSTGAVTSGNYPNWVQQKPGQAPRGLIGGTKFLAPGTPARFSGSLSGGKA |
| | Full | | ALTLSGVQPEDEAEYYCVLWYSNRWVFGSGTKLTVLGGGGSGGGGSGGGGSDKTHTCP |
| | Sequence | | PCPAPELLGGPSVFLFPPKPKDTLMISRTPEVTCVVVDVSHEDPEVKFNWYVDGVEVH |
| | | | NAKTKPCEEQYGSTYRCVSVLTVLHQDWLNGKEYKCKVSNKALPAPIEKTISKAKGQP |
| | | | REPQVYTLPPSREEMTKNQVSLTCLVKGFYPSDIAVEWESNGQPENNYKTTPPVLDSD |
| | | | GSFFLYSKLTVDKSRWQQGNVFSCSVMHEALHNHYTQKSLSLSPGKGGGGSGGGGSGG |
| | | | GGSGGGGSGGGGSGGGGSDKTHTCPPCPAPELLGGPSVFLFPPKPKDTLMISRTPEVT |
| | | | CVVVDVSHEDPEVKFNWYVDGVEVHNAKTKPCEEQYGSTYRCVSVLTVLHQDWLNGKE |
| | | | YKCKVSNKALPAPIEKTISKAKGQPREPQVYTLPPSREEMTKNQVSLTCLVKGFYPSD |
| | | | IAVEWESNGQPENNYKTTPPVLDSDGSFFLYSKLTVDKSRWQQGNVFSCSVMHEALHN |
| | | | HYTQKSLSLSPGKGGGGSGGGGSGGGGSQVQLVQSGAEVKKPGASVKVSCKASGYTFT |
| | | | SYWMHWVRQAPGQCLEWIGYITPSTGYTEYNQKFKGRVTMTRDKSTSTVYMELSSLTS |
| | | | EDTAVYYCARVHDYDRAMEYWGQGTTVTVSSGGGGSGGGGSGGGGSDIQMTQSPSSLS |
| | | | ASVGDRVTITCKASQDINKYIAWYQQKPGKGPKLLIYYTSTLQPGVPSRFSGSGSGTD |
| | | | FTFTISSLQPEDIATYYCLQYASYPFTFGCGTRLEIKSGGGGSEVQLVESGGGLVQPG |
| | | | GSLKLSCAASGFTFNKYAMNWVRQAPGKGLEWVARIRSKYNNYATYYAEAVKGRFTIS |
| | | | RDDSKNTVYLQMNNLKTEDTAVYYCVRNENIGTSYISYWAYWGQGTLVTVSSGGGGSG |
| | | | GGGSGGGGSQTVVTQEPSLTVSPGGTVTITCGSSTGAVTSGNYPNWVQQKPGQAPRGL |
| | | | IGGTKFLAPGTPARFSGSLSGGKAALTLSGVQPEDEAEYYCVLWYSNRWVFGSGTKLT |
| | | | VL |
| 2514 | CD22 28- | artificial | QVQLVQSGAEVKKPGASVKVSCKASGYTFTSYGISWVRQAPGQCLEWMGWISAYSGNA |
| | B7N65S CC x | | IYAQKLQGRVTMTRDTSTSTAYMELRSLRSDDTAVYYCARDPDYYGSGSYSDYWGQGT |
| | I2L x | | LVTVSSGGGGSGGGGSGGGGSEIVLTQSPATLSVSPGERATLSCRASQSVSSNLAWYQ |
| | (G4S) 3 x | | QKPGQAPRLLIYGASSRATGIPARFSGSGSGTEFTLTISSLQSEDFAVYYCQQYHSWP |
| | ScFc x | | LLTFGCGTKVEIKSGGGGSEVQLVESGGGLVQPGGSLKLSCAASGFTFNKYAMNWVRQ |
| | (G4S) 3 x | | APGKGMEWVARIRSKYNNYATYYADAVKDRFTISRDDSKNTLYLQMNNLKTEDTAVYY |
| | CD20 99E5 | | CVRAGNFGSSYISYFAYWGQGTLVTVSSGGGGSGGGGSGGGGSQTVVTQEPSLTVSPG |
| | CC x I2L- | | GTVTITCGSSTGAVTSGNYPNWIQKKPGQAPRGLIGGTKFLAPGTPARFSGSLEGGKA |
| | Full | | ALTLSGVQPEDEAEYYCVLYYSNRWVFGSGTKLTVLGGGGSGGGGSGGGGSDKTHTCP |
| | Sequence | | PCPAPELLGGPSVFLFPPKPKDTLMISRTPEVTCVVVDVSHEDPEVKENWYVDGVEVH |
| | | | NAKTKPCEEQYGSTYRCVSVLTVLHQDWLNGKEYKCKVSNKALPAPIEKTISKAKGQP |
| | | | REPQVYTLPPSREEMTKNQVSLTCLVKGFYPSDIAVEWESNGQPENNYKTTPPVLDSD |
| | | | GSFFLYSKLTVDKSRWQQGNVFSCSVMHEALHNHYTQKSLSLSPGKGGGGSGGGGSGG |
| | | | GGSGGGGSGGGGSGGGGSDKTHTCPPCPAPELLGGPSVFLFPPKPKDTLMISRTPEVT |
| | | | CVVVDVSHEDPEVKFNWYVDGVEVHNAKTKPCEEQYGSTYRCVSVLTVLHQDWLNGKE |
| | | | YKCKVSNKALPAPIEKTISKAKGQPREPQVYTLPPSREEMTKNQVSLTCLVKGFYPSD |
| | | | IAVEWESNGQPENNYKTTPPVLDSDGSFFLYSKLTVDKSRWQQGNVFSCSVMHEALHN |
| | | | HYTQKSLSLSPGKGGGGSGGGGSGGGGSQVQLVQSGAEVKKPGASVKVSCKASGYTFT |
| | | | SYWMHWVRQAPGQCLEWIGYITPSTGYTEYNQKFKGRVTMTRDKSTSTVYMELSSLTS |
| | | | EDTAVYYCARVHDYDRAMEYWGQGTTVTVSSGGGGSGGGGSGGGGSDIQMTQSPSSLS |
| | | | ASVGDRVTITCKASQDINKYIAWYQQKPGKGPKLLIYYTSTLQPGVPSRFSGSGSGTD |
| | | | FTFTISSLQPEDIATYYCLQYASYPFTFGCGTRLEIKSGGGGSEVQLVESGGGLVQPG |
| | | | GSLKLSCAASGFTFNKYAMNWVRQAPGKGMEWVARIRSKYNNYATYYADAVKDRFTIS |
| | | | RDDSKNTLYLQMNNLKTEDTAVYYCVRAGNFGSSYISYFAYWGQGTLVTVSSGGGGSG |
| | | | GGGSGGGGSQTVVTQEPSLTVSPGGTVTITCGSSTGAVTSGNYPNWIQKKPGQAPRGL |
| | | | IGGTKFLAPGTPARFSGSLEGGKAALTLSGVQPEDEAEYYCVLYYSNRWVFGSGTKLT |
| | | | VL |
| 2515 | CD22 28- | artificial | QVQLVQSGAEVKKPGASVKVSCKASGYTFTSYGISWVRQAPGQCLEWMGWISAYSGNA |
| | B7N65S CC x | | IYAQKLQGRVTMTRDTSTSTAYMELRSLRSDDTAVYYCARDPDYYGSGSYSDYWGQGT |
| | I2M x | | LVTVSSGGGGSGGGGSGGGGSEIVLTQSPATLSVSPGERATLSCRASQSVSSNLAWYQ |
| | (G4S) 3 x | | QKPGQAPRLLIYGASSRATGIPARFSGSGSGTEFTLTISSLQSEDFAVYYCQQYHSWP |
| | ScFc x | | LLTFGCGTKVEIKSGGGGSEVQLVESGGGLVQPGGSLKLSCAASGFTENKYAMNWVRQ |
| | (G4S) 3 x | | APGKGMEWVARIRSKYNNYATYYADAVKDRFTISRDDSKNTLYLQMNNLKTEDTAVYY |
| | CD20 99E5 | | CVRAGNFGTSYISYWAYWGQGTLVTVSSGGGGSGGGGSGGGGSQTVVTQEPSLTVSPG |
| | CC x I2M- | | GTVTITCGSSTGAVTSGNYPNWVQKKPGQAPRGLIGGTKFLAPGTPARFSGSLSGGKA |
| | Full | | ALTLSGVQPEDEAEYYCVLWYSNRWVFGSGTKLTVLGGGGSGGGGSGGGGSDKTHTCP |
| | Sequence | | PCPAPELLGGPSVFLFPPKPKDTLMISRTPEVTCVVVDVSHEDPEVKENWYVDGVEVH |
| | | | NAKTKPCEEQYGSTYRCVSVLTVLHQDWLNGKEYKCKVSNKALPAPIEKTISKAKGQP |
| | | | REPQVYTLPPSREEMTKNQVSLTCLVKGFYPSDIAVEWESNGQPENNYKTTPPVLDSD |
| | | | GSFFLYSKLTVDKSRWQQGNVFSCSVMHEALHNHYTQKSLSLSPGKGGGGSGGGGSGG |
| | | | GGSGGGGSGGGGSGGGGSDKTHTCPPCPAPELLGGPSVFLFPPKPKDTLMISRTPEVT |
| | | | CVVVDVSHEDPEVKFNWYVDGVEVHNAKTKPCEEQYGSTYRCVSVLTVLHQDWLNGKE |
| | | | YKCKVSNKALPAPIEKTISKAKGQPREPQVYTLPPSREEMTKNQVSLTCLVKGFYPSD |
| | | | IAVEWESNGQPENNYKTTPPVLDSDGSFFLYSKLTVDKSRWQQGNVFSCSVMHEALHN |
| | | | HYTQKSLSLSPGKGGGGSGGGGSGGGGSQVQLVQSGAEVKKPGASVKVSCKASGYTFT |
| | | | SYWMHWVRQAPGQCLEWIGYITPSTGYTEYNQKFKGRVTMTRDKSTSTVYMELSSLTS |
| | | | EDTAVYYCARVHDYDRAMEYWGQGTTVTVSSGGGGSGGGGSGGGGSDIQMTQSPSSLS |
| | | | ASVGDRVTITCKASQDINKYIAWYQQKPGKGPKLLIYYTSTLQPGVPSRFSGSGSGTD |
| | | | FTFTISSLQPEDIATYYCLQYASYPFTFGCGTRLEIKSGGGGSEVQLVESGGGLVQPG |
| | | | GSLKLSCAASGFTFNKYAMNWVRQAPGKGMEWVARIRSKYNNYATYYADAVKDRFTIS |
| | | | RDDSKNTLYLQMNNLKTEDTAVYYCVRAGNFGTSYISYWAYWGQGTLVTVSSGGGGSG |
| | | | GGGSGGGGSQTVVTQEPSLTVSPGGTVTITCGSSTGAVTSGNYPNWVQKKPGQAPRGL |
| | | | IGGTKFLAPGTPARFSGSLSGGKAALTLSGVQPEDEAEYYCVLWYSNRWVFGSGTKLT |
| | | | VL |
| 2516 | CD22 28- | artificial | QVQLVQSGAEVKKPGASVKVSCKASGYTFTSYGISWVRQAPGQCLEWMGWISAYSGNA |
| | B7N65S CC x | | IYAQKLQGRVTMTRDTSTSTAYMELRSLRSDDTAVYYCARDPDYYGSGSYSDYWGQGT |
| | I2M2 x | | LVTVSSGGGGSGGGGSGGGGSEIVLTQSPATLSVSPGERATLSCRASQSVSSNLAWYQ |
| | (G4S) 3 x | | QKPGQAPRLLIYGASSRATGIPARFSGSGSGTEFTLTISSLQSEDFAVYYCQQYHSWP |
| | ScFc x | | LLTFGCGTKVEIKSGGGGSEVQLVESGGGLVQPGGSLKLSCAASGFTENKYAINWVRE |
| | (G4S) 3 x | | APGKGLEWVARIRSKYNNYATYYADAVKDRFTISRDDSKNTAYLQMNNLKTEDTAVYY |
| | CD20 99E5 | | CVRNANFGTSYISYFAYWGQGTLVTVSSGGGGSGGGGSGGGGSQTVVTQEPSLTVSPG |
| | CC x I2M2- | | GTVTLTCGSSTGAVTSGNYPNWVQKKPGQAPRGLIGGTKFLAPGTPARFSGSLLGGKA |
| | Full | | ALTLSGVQPEDEAEYYCVLWYSNRWVFGSGTKLTVLGGGGSGGGGSGGGGSDKTHTCP |
| | Sequence | | PCPAPELLGGPSVFLFPPKPKDTLMISRTPEVTCVVVDVSHEDPEVKFNWYVDGVEVH |
| | | | NAKTKPCEEQYGSTYRCVSVLTVLHQDWLNGKEYKCKVSNKALPAPIEKTISKAKGQP |
| | | | REPQVYTLPPSREEMTKNQVSLTCLVKGFYPSDIAVEWESNGQPENNYKTTPPVLDSD |
| | | | GSFFLYSKLTVDKSRWQQGNVFSCSVMHEALHNHYTQKSLSLSPGKGGGGSGGGGSGG |
| | | | GGSGGGGSGGGGSGGGGSDKTHTCPPCPAPELLGGPSVFLFPPKPKDTLMISRTPEVT |
| | | | CVVVDVSHEDPEVKFNWYVDGVEVHNAKTKPCEEQYGSTYRCVSVLTVLHQDWLNGKE |
| | | | YKCKVSNKALPAPIEKTISKAKGQPREPQVYTLPPSREEMTKNQVSLTCLVKGFYPSD |
| | | | IAVEWESNGQPENNYKTTPPVLDSDGSFFLYSKLTVDKSRWQQGNVFSCSVMHEALHN |
| | | | HYTQKSLSLSPGKGGGGSGGGGSGGGGSQVQLVQSGAEVKKPGASVKVSCKASGYTFT |
| | | | SYWMHWVRQAPGQCLEWIGYITPSTGYTEYNQKFKGRVTMTRDKSTSTVYMELSSLTS |
| | | | EDTAVYYCARVHDYDRAMEYWGQGTTVTVSSGGGGSGGGGSGGGGSDIQMTQSPSSLS |
| | | | ASVGDRVTITCKASQDINKYIAWYQQKPGKGPKLLIYYTSTLQPGVPSRFSGSGSGTD |
| | | | FTFTISSLQPEDIATYYCLQYASYPFTFGCGTRLEIKSGGGGSEVQLVESGGGLVQPG |
| | | | GSLKLSCAASGFTFNKYAINWVREAPGKGLEWVARIRSKYNNYATYYADAVKDRFTIS |
| | | | RDDSKNTAYLQMNNLKTEDTAVYYCVRNANFGTSYISYFAYWGQGTLVTVSSGGGGSG |
| | | | GGGSGGGGSQTVVTQEPSLTVSPGGTVTLTCGSSTGAVTSGNYPNWVQKKPGQAPRGL |
| | | | IGGTKFLAPGTPARFSGSLLGGKAALTLSGVQPEDEAEYYCVLWYSNRWVFGSGTKLT |
| | | | VL |
| 2517 | CS | artificial | DIQMTQSPSSLSASVGDRVTITCKASQDVSTAVAWYQQKPGKAPKLLIYSASYRYTGV |
| | PDL241.12.LH | | PDRFTGSGSGTDFTLTISSLQPEDFATYYCQQHYSTPPYTFGCGTKVEIKRGGGGSGG |
| | CCx BC A7 | | GGSGGGGSQVQLVQSGAEVKKPGASVKVSCKASGYAFSSSWMNWVRQAPGQCLEWIGR |
| | 27-C4-G7 CC | | IYPGDADAKYNAKFKGKATLTADKSTSTAYMELSSLRSEDTAVYYCARSTMIATGAMD |
| | x I2Cx scFc | | YWGQGTLVTVSSSGGGGSQVQLVQSGAEVKKPGASVKVSCKASGYTFTNHIIHWVRQA |
| | -Full | | PGQCLEWMGYINPYPGYHAYNEKFQGRATMTSDTSTSTVYMELSSLRSEDTAVYYCAR |
| | Sequence | | DGYYRDTDVLDYWGQGTLVTVSSGGGGSGGGGSGGGGSDIQMTQSPSSLSASVGDRVT |
| | | | ITCQASQDISNYLNWYQQKPGKAPKLLIYYTSRLHTGVPSRFSGSGSGTDFTFTISSL |
| | | | EPEDIATYYCQQGNTLPWTFGCGTKVEIKSGGGGSEVQLVESGGGLVQPGGSLKLSCA |
| | | | ASGFTFNKYAMNWVRQAPGKGLEWVARIRSKYNNYATYYADSVKDRFTISRDDSKNTA |
| | | | YLQMNNLKTEDTAVYYCVRHGNFGNSYISYWAYWGQGTLVTVSSGGGGSGGGGSGGGG |
| | | | SQTVVTQEPSLTVSPGGTVTLTCGSSTGAVTSGNYPNWVQQKPGQAPRGLIGGTKFLA |
| | | | PGTPARFSGSLLGGKAALTLSGVQPEDEAEYYCVLWYSNRWVFGGGTKLTVLGGGGDK |
| | | | THTCPPCPAPELLGGPSVFLFPPKPKDTLMISRTPEVTCVVVDVSHEDPEVKENWYVD |
| | | | GVEVHNAKTKPCEEQYGSTYRCVSVLTVLHQDWLNGKEYKCKVSNKALPAPIEKTISK |
| | | | AKGQPREPQVYTLPPSREEMTKNQVSLTCLVKGFYPSDIAVEWESNGQPENNYKTTPP |
| | | | VLDSDGSFFLYSKLTVDKSRWQQGNVFSCSVMHEALHNHYTQKSLSLSPGKGGGGSGG |
| | | | GGSGGGGSGGGGSGGGGSGGGGSDKTHTCPPCPAPELLGGPSVFLFPPKPKDTLMISR |
| | | | TPEVTCVVVDVSHEDPEVKFNWYVDGVEVHNAKTKPCEEQYGSTYRCVSVLTVLHQDW |
| | | | LNGKEYKCKVSNKALPAPIEKTISKAKGQPREPQVYTLPPSREEMTKNQVSLTCLVKG |
| | | | FYPSDIAVEWESNGQPENNYKTTPPVLDSDGSFFLYSKLTVDKSRWQQGNVFSCSVMH |
| | | | EALHNHYTQKSLSLSPGK |
| 2518 | CS | artificial | DIQMTQSPSSLSASVGDRVTITCKASQDVSTAVAWYQQKPGKAPKLLIYSASYRYTGV |
| | PDL241.12.LH | | PDRFTGSGSGTDFTLTISSLQPEDFATYYCQQHYSTPPYTFGCGTKVEIKRGGGGSGG |
| | CCx BC A7 | | GGSGGGGSQVQLVQSGAEVKKPGASVKVSCKASGYAFSSSWMNWVRQAPGQCLEWIGR |
| | 27-C4-G7 CC | | IYPGDADAKYNAKFKGKATLTADKSTSTAYMELSSLRSEDTAVYYCARSTMIATGAMD |
| | x I2Ex scFc | | YWGQGTLVTVSSSGGGGSQVQLVQSGAEVKKPGASVKVSCKASGYTFTNHIIHWVRQA |
| | -Full | | PGQCLEWMGYINPYPGYHAYNEKFQGRATMTSDTSTSTVYMELSSLRSEDTAVYYCAR |
| | Sequence | | DGYYRDTDVLDYWGQGTLVTVSSGGGGSGGGGSGGGGSDIQMTQSPSSLSASVGDRVT |
| | | | ITCQASQDISNYLNWYQQKPGKAPKLLIYYTSRLHTGVPSRFSGSGSGTDFTFTISSL |
| | | | EPEDIATYYCQQGNTLPWTFGCGTKVEIKSGGGGSEVQLVESGGGLVQPGGSLKLSCA |
| | | | ASGFTFNKYAINWVRQAPGKGLEWVARIRSKYNNYATYYADAVKDRFTISRDDSKNTV |
| | | | YLQMNNLKTEDTAVYYCARAGNFGSSYISYWAYWGQGTLVTVSSGGGGSGGGGSGGGG |
| | | | SQTVVTQEPSLTVSPGGTVTITCGSSTGAVTSGNYPNWVQKKPGQAPRGLIGGTKFLA |
| | | | PGTPARFSGSLSGGKAALTLSGVQPEDEAEYYCVLWYSNRWVFGSGTKLTVLGGGGDK |
| | | | THTCPPCPAPELLGGPSVFLFPPKPKDTLMISRTPEVTCVVVDVSHEDPEVKENWYVD |
| | | | GVEVHNAKTKPCEEQYGSTYRCVSVLTVLHQDWLNGKEYKCKVSNKALPAPIEKTISK |
| | | | AKGQPREPQVYTLPPSREEMTKNQVSLTCLVKGFYPSDIAVEWESNGQPENNYKTTPP |
| | | | VLDSDGSFFLYSKLTVDKSRWQQGNVFSCSVMHEALHNHYTQKSLSLSPGKGGGGSGG |
| | | | GGSGGGGSGGGGSGGGGSGGGGSDKTHTCPPCPAPELLGGPSVFLFPPKPKDTLMISR |
| | | | TPEVTCVVVDVSHEDPEVKFNWYVDGVEVHNAKTKPCEEQYGSTYRCVSVLTVLHQDW |
| | | | LNGKEYKCKVSNKALPAPIEKTISKAKGQPREPQVYTLPPSREEMTKNQVSLTCLVKG |
| | | | FYPSDIAVEWESNGQPENNYKTTPPVLDSDGSFFLYSKLTVDKSRWQQGNVFSCSVMH |
| | | | EALHNHYTQKSLSLSPGK |
| 2519 | CS | artificial | DIQMTQSPSSLSASVGDRVTITCKASQDVSTAVAWYQQKPGKAPKLLIYSASYRYTGV |
| | PDL241.12.LH | | PDRFTGSGSGTDFTLTISSLQPEDFATYYCQQHYSTPPYTFGCGTKVEIKRGGGGSGG |
| | CCx BC A7 | | GGSGGGGSQVQLVQSGAEVKKPGASVKVSCKASGYAFSSSWMNWVRQAPGQCLEWIGR |
| | 27-C4-G7 CC | | IYPGDADAKYNAKFKGKATLTADKSTSTAYMELSSLRSEDTAVYYCARSTMIATGAMD |
| | x I2Kx scFc | | YWGQGTLVTVSSSGGGGSQVQLVQSGAEVKKPGASVKVSCKASGYTFTNHIIHWVRQA |
| | -Full | | PGQCLEWMGYINPYPGYHAYNEKFQGRATMTSDTSTSTVYMELSSLRSEDTAVYYCAR |
| | Sequence | | DGYYRDTDVLDYWGQGTLVTVSSGGGGSGGGGSGGGGSDIQMTQSPSSLSASVGDRVT |
| | | | ITCQASQDISNYLNWYQQKPGKAPKLLIYYTSRLHTGVPSRFSGSGSGTDFTFTISSL |
| | | | EPEDIATYYCQQGNTLPWTFGCGTKVEIKSGGGGSEVQLVESGGGLVQPGGSLKLSCA |
| | | | ASGFTFNKYAMNWVRQAPGKGLEWVARIRSKYNNYATYYAEAVKGRFTISRDDSKNTV |
| | | | YLQMNNLKTEDTAVYYCVRNENIGTSYISYWAYWGQGTLVTVSSGGGGSGGGGSGGGG |
| | | | SQTVVTQEPSLTVSPGGTVTITCGSSTGAVTSGNYPNWVQQKPGQAPRGLIGGTKFLA |
| | | | PGTPARFSGSLSGGKAALTLSGVQPEDEAEYYCVLWYSNRWVFGSGTKLTVLGGGGDK |
| | | | THTCPPCPAPELLGGPSVFLFPPKPKDTLMISRTPEVTCVVVDVSHEDPEVKENWYVD |
| | | | GVEVHNAKTKPCEEQYGSTYRCVSVLTVLHQDWLNGKEYKCKVSNKALPAPIEKTISK |
| | | | AKGQPREPQVYTLPPSREEMTKNQVSLTCLVKGFYPSDIAVEWESNGQPENNYKTTPP |
| | | | VLDSDGSFFLYSKLTVDKSRWQQGNVFSCSVMHEALHNHYTQKSLSLSPGKGGGGSGG |
| | | | GGSGGGGSGGGGSGGGGSGGGGSDKTHTCPPCPAPELLGGPSVFLFPPKPKDTLMISR |
| | | | TPEVTCVVVDVSHEDPEVKFNWYVDGVEVHNAKTKPCEEQYGSTYRCVSVLTVLHQDW |
| | | | LNGKEYKCKVSNKALPAPIEKTISKAKGQPREPQVYTLPPSREEMTKNQVSLTCLVKG |
| | | | FYPSDIAVEWESNGQPENNYKTTPPVLDSDGSFFLYSKLTVDKSRWQQGNVFSCSVMH |
| | | | EALHNHYTQKSLSLSPGK |
| 2520 | CS | artificial | DIQMTQSPSSLSASVGDRVTITCKASQDVSTAVAWYQQKPGKAPKLLIYSASYRYTGV |
| | PDL241.12.LH | | PDRFTGSGSGTDFTLTISSLQPEDFATYYCQQHYSTPPYTFGCGTKVEIKRGGGGSGG |
| | CCx BC A7 | | GGSGGGGSQVQLVQSGAEVKKPGASVKVSCKASGYAFSSSWMNWVRQAPGQCLEWIGR |
| | 27-C4-G7 CC | | IYPGDADAKYNAKFKGKATLTADKSTSTAYMELSSLRSEDTAVYYCARSTMIATGAMD |
| | x I2Lx scFc | | YWGQGTLVTVSSSGGGGSQVQLVQSGAEVKKPGASVKVSCKASGYTFTNHIIHWVRQA |
| | -Full | | PGQCLEWMGYINPYPGYHAYNEKFQGRATMTSDTSTSTVYMELSSLRSEDTAVYYCAR |
| | Sequence | | DGYYRDTDVLDYWGQGTLVTVSSGGGGSGGGGSGGGGSDIQMTQSPSSLSASVGDRVT |
| | | | ITCQASQDISNYLNWYQQKPGKAPKLLIYYTSRLHTGVPSRFSGSGSGTDFTFTISSL |
| | | | EPEDIATYYCQQGNTLPWTFGCGTKVEIKSGGGGSEVQLVESGGGLVQPGGSLKLSCA |
| | | | ASGFTFNKYAMNWVRQAPGKGMEWVARIRSKYNNYATYYADAVKDRFTISRDDSKNTL |
| | | | YLQMNNLKTEDTAVYYCVRAGNFGSSYISYFAYWGQGTLVTVSSGGGGSGGGGSGGGG |
| | | | SQTVVTQEPSLTVSPGGTVTITCGSSTGAVTSGNYPNWIQKKPGQAPRGLIGGTKFLA |
| | | | PGTPARFSGSLEGGKAALTLSGVQPEDEAEYYCVLYYSNRWVFGSGTKLTVLGGGGDK |
| | | | THTCPPCPAPELLGGPSVFLFPPKPKDTLMISRTPEVTCVVVDVSHEDPEVKENWYVD |
| | | | GVEVHNAKTKPCEEQYGSTYRCVSVLTVLHQDWLNGKEYKCKVSNKALPAPIEKTISK |
| | | | AKGQPREPQVYTLPPSREEMTKNQVSLTCLVKGFYPSDIAVEWESNGQPENNYKTTPP |
| | | | VLDSDGSFFLYSKLTVDKSRWQQGNVFSCSVMHEALHNHYTQKSLSLSPGKGGGGSGG |
| | | | GGSGGGGSGGGGSGGGGSGGGGSDKTHTCPPCPAPELLGGPSVFLFPPKPKDTLMISR |
| | | | TPEVTCVVVDVSHEDPEVKFNWYVDGVEVHNAKTKPCEEQYGSTYRCVSVLTVLHQDW |
| | | | LNGKEYKCKVSNKALPAPIEKTISKAKGQPREPQVYTLPPSREEMTKNQVSLTCLVKG |
| | | | FYPSDIAVEWESNGQPENNYKTTPPVLDSDGSFFLYSKLTVDKSRWQQGNVFSCSVMH |
| | | | EALHNHYTQKSLSLSPGK |
| 2521 | CS | artificial | DIQMTQSPSSLSASVGDRVTITCKASQDVSTAVAWYQQKPGKAPKLLIYSASYRYTGV |
| | PDL241.12.LH | | PDRFTGSGSGTDFTLTISSLQPEDFATYYCQQHYSTPPYTFGCGTKVEIKRGGGGSGG |
| | CCx BC A7 | | GGSGGGGSQVQLVQSGAEVKKPGASVKVSCKASGYAFSSSWMNWVRQAPGQCLEWIGR |
| | 27-C4-G7 CC | | IYPGDADAKYNAKFKGKATLTADKSTSTAYMELSSLRSEDTAVYYCARSTMIATGAMD |
| | x I2M2x | | YWGQGTLVTVSSSGGGGSQVQLVQSGAEVKKPGASVKVSCKASGYTFTNHIIHWVRQA |
| | scFc-Full | | PGQCLEWMGYINPYPGYHAYNEKFQGRATMTSDTSTSTVYMELSSLRSEDTAVYYCAR |
| | Sequence | | DGYYRDTDVLDYWGQGTLVTVSSGGGGSGGGGSGGGGSDIQMTQSPSSLSASVGDRVT |
| | | | ITCQASQDISNYLNWYQQKPGKAPKLLIYYTSRLHTGVPSRFSGSGSGTDFTFTISSL |
| | | | EPEDIATYYCQQGNTLPWTFGCGTKVEIKSGGGGSEVQLVESGGGLVQPGGSLKLSCA |
| | | | ASGFTFNKYAINWVREAPGKGLEWVARIRSKYNNYATYYADAVKDRFTISRDDSKNTA |
| | | | YLQMNNLKTEDTAVYYCVRNANFGTSYISYFAYWGQGTLVTVSSGGGGSGGGGSGGGG |
| | | | SQTVVTQEPSLTVSPGGTVTLTCGSSTGAVTSGNYPNWVQKKPGQAPRGLIGGTKFLA |
| | | | PGTPARFSGSLLGGKAALTLSGVQPEDEAEYYCVLWYSNRWVFGSGTKLTVLGGGGDK |
| | | | THTCPPCPAPELLGGPSVFLFPPKPKDTLMISRTPEVTCVVVDVSHEDPEVKFNWYVD |
| | | | GVEVHNAKTKPCEEQYGSTYRCVSVLTVLHQDWLNGKEYKCKVSNKALPAPIEKTISK |
| | | | AKGQPREPQVYTLPPSREEMTKNQVSLTCLVKGFYPSDIAVEWESNGQPENNYKTTPP |
| | | | VLDSDGSFFLYSKLTVDKSRWQQGNVFSCSVMHEALHNHYTQKSLSLSPGKGGGGSGG |
| | | | GGSGGGGSGGGGSGGGGSGGGGSDKTHTCPPCPAPELLGGPSVFLFPPKPKDTLMISR |
| | | | TPEVTCVVVDVSHEDPEVKFNWYVDGVEVHNAKTKPCEEQYGSTYRCVSVLTVLHQDW |
| | | | LNGKEYKCKVSNKALPAPIEKTISKAKGQPREPQVYTLPPSREEMTKNQVSLTCLVKG |
| | | | FYPSDIAVEWESNGQPENNYKTTPPVLDSDGSFFLYSKLTVDKSRWQQGNVFSCSVMH |
| | | | EALHNHYTQKSLSLSPGK |
| 2522 | CS | artificial | DIQMTQSPSSLSASVGDRVTITCKASQDVSTAVAWYQQKPGKAPKLLIYSASYRYTGV |
| | PDL241.12.LH | | PDRFTGSGSGTDFTLTISSLQPEDFATYYCQQHYSTPPYTFGCGTKVEIKRGGGGSGG |
| | CCx BC A7 | | GGSGGGGSQVQLVQSGAEVKKPGASVKVSCKASGYAFSSSWMNWVRQAPGQCLEWIGR |
| | 27-C4-G7 CC | | IYPGDADAKYNAKFKGKATLTADKSTSTAYMELSSLRSEDTAVYYCARSTMIATGAMD |
| | x I2Mx scFc | | YWGQGTLVTVSSSGGGGSQVQLVQSGAEVKKPGASVKVSCKASGYTFTNHIIHWVRQA |
| | -Full | | PGQCLEWMGYINPYPGYHAYNEKFQGRATMTSDTSTSTVYMELSSLRSEDTAVYYCAR |
| | Sequence | | DGYYRDTDVLDYWGQGTLVTVSSGGGGSGGGGSGGGGSDIQMTQSPSSLSASVGDRVT |
| | | | ITCQASQDISNYLNWYQQKPGKAPKLLIYYTSRLHTGVPSRFSGSGSGTDFTFTISSL |
| | | | EPEDIATYYCQQGNTLPWTFGCGTKVEIKSGGGGSEVQLVESGGGLVQPGGSLKLSCA |
| | | | ASGFTFNKYAMNWVRQAPGKGMEWVARIRSKYNNYATYYADAVKDRFTISRDDSKNTL |
| | | | YLQMNNLKTEDTAVYYCVRAGNFGTSYISYWAYWGQGTLVTVSSGGGGSGGGGSGGGG |
| | | | SQTVVTQEPSLTVSPGGTVTITCGSSTGAVTSGNYPNWVQKKPGQAPRGLIGGTKFLA |
| | | | PGTPARFSGSLSGGKAALTLSGVQPEDEAEYYCVLWYSNRWVFGSGTKLTVLGGGGDK |
| | | | THTCPPCPAPELLGGPSVFLFPPKPKDTLMISRTPEVTCVVVDVSHEDPEVKENWYVD |
| | | | GVEVHNAKTKPCEEQYGSTYRCVSVLTVLHQDWLNGKEYKCKVSNKALPAPIEKTISK |
| | | | AKGQPREPQVYTLPPSREEMTKNQVSLTCLVKGFYPSDIAVEWESNGQPENNYKTTPP |
| | | | VLDSDGSFFLYSKLTVDKSRWQQGNVFSCSVMHEALHNHYTQKSLSLSPGKGGGGSGG |
| | | | GGSGGGGSGGGGSGGGGSGGGGSDKTHTCPPCPAPELLGGPSVFLFPPKPKDTLMISR |
| | | | TPEVTCVVVDVSHEDPEVKFNWYVDGVEVHNAKTKPCEEQYGSTYRCVSVLTVLHQDW |
| | | | LNGKEYKCKVSNKALPAPIEKTISKAKGQPREPQVYTLPPSREEMTKNQVSLTCLVKG |
| | | | FYPSDIAVEWESNGQPENNYKTTPPVLDSDGSFFLYSKLTVDKSRWQQGNVFSCSVMH |
| | | | EALHNHYTQKSLSLSPGK |
| 2523 | FL 7-A8 CC | artificial | QVTLKESGPTLVKPTETLTLTCTLSGFSLNNARMGVSWIRQPPGKCLEWLAHIFSNDE |
| | xCD123 24- | | KSYSTSLKNRLTISKDSSKTQVVLTMTNVDPVDTATYYCARIVGYGSGWYGFFDYWGQ |
| | B4-f NK CC | | GTLVTVSSGGGGSGGGGSGGGGSDIQMTQSPSSLSASVGDRVTITCRASQGIRNDLGW |
| | x I2C x | | YQQKPGKAPKRLIYAASTLQSGVPSRFSGSGSGTEFTLTISSLQPEDFATYYCLQHNS |
| | scFc-Full | | YPLTFGCGTKVEIKSGGGGSEVQLLESGGGLVQPGGSLRLSCAASGFTFSHYAMSWVR |
| | Sequence | | QAPGKCLEWVSAVSGGGDKTLYADAVKGRFTISRDNSKNTLFLQMNSLRAEDTAIYYC |
| | | | ARLRGFYYGMDVWGQGTTVTVSSGGGGSGGGGSGGGGSDIVLTQSPLSLPVTPGEPAS |
| | | | ISCRSSQSLLHSNKYNYLDWYLQKPGQSPQLLIYLGSNRASGVPDRFSGSGSGTDFTL |
| | | | KISRVEAEDVGVYYCMQALQTPPITFGCGTRLEIKSGGGGSEVQLVESGGGLVQPGGS |
| | | | LKLSCAASGFTFNKYAMNWVRQAPGKGLEWVARIRSKYNNYATYYADSVKDRFTISRD |
| | | | DSKNTAYLQMNNLKTEDTAVYYCVRHGNFGNSYISYWAYWGQGTLVTVSSGGGGSGGG |
| | | | GSGGGGSQTVVTQEPSLTVSPGGTVTLTCGSSTGAVTSGNYPNWVQQKPGQAPRGLIG |
| | | | GTKFLAPGTPARFSGSLLGGKAALTLSGVQPEDEAEYYCVLWYSNRWVFGGGTKLTVL |
| | | | GGGGDKTHTCPPCPAPELLGGPSVFLFPPKPKDTLMISRTPEVTCVVVDVSHEDPEVK |
| | | | FNWYVDGVEVHNAKTKPCEEQYGSTYRCVSVLTVLHQDWLNGKEYKCKVSNKALPAPI |
| | | | EKTISKAKGQPREPQVYTLPPSREEMTKNQVSLTCLVKGFYPSDIAVEWESNGQPENN |
| | | | YKTTPPVLDSDGSFFLYSKLTVDKSRWQQGNVFSCSVMHEALHNHYTQKSLSLSPGKG |
| | | | GGGSGGGGSGGGGSGGGGSGGGGSGGGGSDKTHTCPPCPAPELLGGPSVFLFPPKPKD |
| | | | TLMISRTPEVTCVVVDVSHEDPEVKENWYVDGVEVHNAKTKPCEEQYGSTYRCVSVLT |
| | | | VLHQDWLNGKEYKCKVSNKALPAPIEKTISKAKGQPREPQVYTLPPSREEMTKNQVSL |
| | | | TCLVKGFYPSDIAVEWESNGQPENNYKTTPPVLDSDGSFFLYSKLTVDKSRWQQGNVF |
| | | | SCSVMHEALHNHYTQKSLSLSPGK |
| 2524 | FL 7-A8 CC | artificial | QVTLKESGPTLVKPTETLTLTCTLSGFSLNNARMGVSWIRQPPGKCLEWLAHIFSNDE |
| | xCD123 24- | | KSYSTSLKNRLTISKDSSKTQVVLTMTNVDPVDTATYYCARIVGYGSGWYGFFDYWGQ |
| | B4-f NK CC | | GTLVTVSSGGGGSGGGGSGGGGSDIQMTQSPSSLSASVGDRVTITCRASQGIRNDLGW |
| | x I2E X | | YQQKPGKAPKRLIYAASTLQSGVPSRFSGSGSGTEFTLTISSLQPEDFATYYCLQHNS |
| | scFc-Full | | YPLTFGCGTKVEIKSGGGGSEVQLLESGGGLVQPGGSLRLSCAASGFTFSHYAMSWVR |
| | Sequence | | QAPGKCLEWVSAVSGGGDKTLYADAVKGRFTISRDNSKNTLFLQMNSLRAEDTAIYYC |
| | | | ARLRGFYYGMDVWGQGTTVTVSSGGGGSGGGGSGGGGSDIVLTQSPLSLPVTPGEPAS |
| | | | ISCRSSQSLLHSNKYNYLDWYLQKPGQSPQLLIYLGSNRASGVPDRFSGSGSGTDFTL |
| | | | KISRVEAEDVGVYYCMQALQTPPITFGCGTRLEIKSGGGGSEVQLVESGGGLVQPGGS |
| | | | LKLSCAASGFTFNKYAINWVRQAPGKGLEWVARIRSKYNNYATYYADAVKDRFTISRD |
| | | | DSKNTVYLQMNNLKTEDTAVYYCARAGNFGSSYISYWAYWGQGTLVTVSSGGGGSGGG |
| | | | GSGGGGSQTVVTQEPSLTVSPGGTVTITCGSSTGAVTSGNYPNWVQKKPGQAPRGLIG |
| | | | GTKFLAPGTPARFSGSLSGGKAALTLSGVQPEDEAEYYCVLWYSNRWVFGSGTKLTVL |
| | | | GGGGDKTHTCPPCPAPELLGGPSVFLFPPKPKDTLMISRTPEVTCVVVDVSHEDPEVK |
| | | | FNWYVDGVEVHNAKTKPCEEQYGSTYRCVSVLTVLHQDWLNGKEYKCKVSNKALPAPI |
| | | | EKTISKAKGQPREPQVYTLPPSREEMTKNQVSLTCLVKGFYPSDIAVEWESNGQPENN |
| | | | YKTTPPVLDSDGSFFLYSKLTVDKSRWQQGNVFSCSVMHEALHNHYTQKSLSLSPGKG |
| | | | GGGSGGGGSGGGGSGGGGSGGGGSGGGGSDKTHTCPPCPAPELLGGPSVFLFPPKPKD |
| | | | TLMISRTPEVTCVVVDVSHEDPEVKENWYVDGVEVHNAKTKPCEEQYGSTYRCVSVLT |
| | | | VLHQDWLNGKEYKCKVSNKALPAPIEKTISKAKGQPREPQVYTLPPSREEMTKNQVSL |
| | | | TCLVKGFYPSDIAVEWESNGQPENNYKTTPPVLDSDGSFFLYSKLTVDKSRWQQGNVF |
| | | | SCSVMHEALHNHYTQKSLSLSPGK |
| 2525 | FL 7-A8 CC | artificial | QVTLKESGPTLVKPTETLTLTCTLSGFSLNNARMGVSWIRQPPGKCLEWLAHIFSNDE |
| | xCD123 24- | | KSYSTSLKNRLTISKDSSKTQVVLTMTNVDPVDTATYYCARIVGYGSGWYGFFDYWGQ |
| | B4-f NK CC | | GTLVTVSSGGGGSGGGGSGGGGSDIQMTQSPSSLSASVGDRVTITCRASQGIRNDLGW |
| | x I2K X | | YQQKPGKAPKRLIYAASTLQSGVPSRFSGSGSGTEFTLTISSLQPEDFATYYCLQHNS |
| | scFc-Full | | YPLTFGCGTKVEIKSGGGGSEVQLLESGGGLVQPGGSLRLSCAASGFTFSHYAMSWVR |
| | Sequence | | QAPGKCLEWVSAVSGGGDKTLYADAVKGRFTISRDNSKNTLFLQMNSLRAEDTAIYYC |
| | | | ARLRGFYYGMDVWGQGTTVTVSSGGGGSGGGGSGGGGSDIVLTQSPLSLPVTPGEPAS |
| | | | ISCRSSQSLLHSNKYNYLDWYLQKPGQSPQLLIYLGSNRASGVPDRFSGSGSGTDFTL |
| | | | KISRVEAEDVGVYYCMQALQTPPITFGCGTRLEIKSGGGGSEVQLVESGGGLVQPGGS |
| | | | LKLSCAASGFTFNKYAMNWVRQAPGKGLEWVARIRSKYNNYATYYAEAVKGRFTISRD |
| | | | DSKNTVYLQMNNLKTEDTAVYYCVRNENIGTSYISYWAYWGQGTLVTVSSGGGGSGGG |
| | | | GSGGGGSQTVVTQEPSLTVSPGGTVTITCGSSTGAVTSGNYPNWVQQKPGQAPRGLIG |
| | | | GTKFLAPGTPARFSGSLSGGKAALTLSGVQPEDEAEYYCVLWYSNRWVFGSGTKLTVL |
| | | | GGGGDKTHTCPPCPAPELLGGPSVFLFPPKPKDTLMISRTPEVTCVVVDVSHEDPEVK |
| | | | FNWYVDGVEVHNAKTKPCEEQYGSTYRCVSVLTVLHQDWLNGKEYKCKVSNKALPAPI |
| | | | EKTISKAKGQPREPQVYTLPPSREEMTKNQVSLTCLVKGFYPSDIAVEWESNGQPENN |
| | | | YKTTPPVLDSDGSFFLYSKLTVDKSRWQQGNVFSCSVMHEALHNHYTQKSLSLSPGKG |
| | | | GGGSGGGGSGGGGSGGGGSGGGGSGGGGSDKTHTCPPCPAPELLGGPSVFLFPPKPKD |
| | | | TLMISRTPEVTCVVVDVSHEDPEVKENWYVDGVEVHNAKTKPCEEQYGSTYRCVSVLT |
| | | | VLHQDWLNGKEYKCKVSNKALPAPIEKTISKAKGQPREPQVYTLPPSREEMTKNQVSL |
| | | | TCLVKGFYPSDIAVEWESNGQPENNYKTTPPVLDSDGSFFLYSKLTVDKSRWQQGNVF |
| | | | SCSVMHEALHNHYTQKSLSLSPGK |
| 2526 | FL 7-A8 CC | artificial | QVTLKESGPTLVKPTETLTLTCTLSGFSLNNARMGVSWIRQPPGKCLEWLAHIFSNDE |
| | xCD123 24- | | KSYSTSLKNRLTISKDSSKTQVVLTMTNVDPVDTATYYCARIVGYGSGWYGFFDYWGQ |
| | B4-f NK CC | | GTLVTVSSGGGGSGGGGSGGGGSDIQMTQSPSSLSASVGDRVTITCRASQGIRNDLGW |
| | x I2L x | | YQQKPGKAPKRLIYAASTLQSGVPSRFSGSGSGTEFTLTISSLQPEDFATYYCLQHNS |
| | scFc-Full | | YPLTFGCGTKVEIKSGGGGSEVQLLESGGGLVQPGGSLRLSCAASGFTFSHYAMSWVR |
| | Sequence | | QAPGKCLEWVSAVSGGGDKTLYADAVKGRFTISRDNSKNTLFLQMNSLRAEDTAIYYC |
| | | | ARLRGFYYGMDVWGQGTTVTVSSGGGGSGGGGSGGGGSDIVLTQSPLSLPVTPGEPAS |
| | | | ISCRSSQSLLHSNKYNYLDWYLQKPGQSPQLLIYLGSNRASGVPDRFSGSGSGTDFTL |
| | | | KISRVEAEDVGVYYCMQALQTPPITFGCGTRLEIKSGGGGSEVQLVESGGGLVQPGGS |
| | | | LKLSCAASGFTFNKYAMNWVRQAPGKGMEWVARIRSKYNNYATYYADAVKDRFTISRD |
| | | | DSKNTLYLQMNNLKTEDTAVYYCVRAGNFGSSYISYFAYWGQGTLVTVSSGGGGSGGG |
| | | | GSGGGGSQTVVTQEPSLTVSPGGTVTITCGSSTGAVTSGNYPNWIQKKPGQAPRGLIG |
| | | | GTKFLAPGTPARFSGSLEGGKAALTLSGVQPEDEAEYYCVLYYSNRWVFGSGTKLTVL |
| | | | GGGGDKTHTCPPCPAPELLGGPSVFLFPPKPKDTLMISRTPEVTCVVVDVSHEDPEVK |
| | | | FNWYVDGVEVHNAKTKPCEEQYGSTYRCVSVLTVLHQDWLNGKEYKCKVSNKALPAPI |
| | | | EKTISKAKGQPREPQVYTLPPSREEMTKNQVSLTCLVKGFYPSDIAVEWESNGQPENN |
| | | | YKTTPPVLDSDGSFFLYSKLTVDKSRWQQGNVFSCSVMHEALHNHYTQKSLSLSPGKG |
| | | | GGGSGGGGSGGGGSGGGGSGGGGSGGGGSDKTHTCPPCPAPELLGGPSVFLFPPKPKD |
| | | | TLMISRTPEVTCVVVDVSHEDPEVKFNWYVDGVEVHNAKTKPCEEQYGSTYRCVSVLT |
| | | | VLHQDWLNGKEYKCKVSNKALPAPIEKTISKAKGQPREPQVYTLPPSREEMTKNQVSL |
| | | | TCLVKGFYPSDIAVEWESNGQPENNYKTTPPVLDSDGSFFLYSKLTVDKSRWQQGNVE |
| | | | SCSVMHEALHNHYTQKSLSLSPGK |
| 2527 | FL 7-A8 CC | artificial | QVTLKESGPTLVKPTETLTLTCTLSGFSLNNARMGVSWIRQPPGKCLEWLAHIFSNDE |
| | xCD123 24- | | KSYSTSLKNRLTISKDSSKTQVVLTMTNVDPVDTATYYCARIVGYGSGWYGFFDYWGQ |
| | B4-f NK CC | | GTLVTVSSGGGGSGGGGSGGGGSDIQMTQSPSSLSASVGDRVTITCRASQGIRNDLGW |
| | x I2M x | | YQQKPGKAPKRLIYAASTLQSGVPSRFSGSGSGTEFTLTISSLQPEDFATYYCLQHNS |
| | scFc-Full | | YPLTFGCGTKVEIKSGGGGSEVQLLESGGGLVQPGGSLRLSCAASGFTFSHYAMSWVR |
| | Sequence | | QAPGKCLEWVSAVSGGGDKTLYADAVKGRFTISRDNSKNTLFLQMNSLRAEDTAIYYC |
| | | | ARLRGFYYGMDVWGQGTTVTVSSGGGGSGGGGSGGGGSDIVLTQSPLSLPVTPGEPAS |
| | | | ISCRSSQSLLHSNKYNYLDWYLQKPGQSPQLLIYLGSNRASGVPDRFSGSGSGTDFTL |
| | | | KISRVEAEDVGVYYCMQALQTPPITFGCGTRLEIKSGGGGSEVQLVESGGGLVQPGGS |
| | | | LKLSCAASGFTFNKYAMNWVRQAPGKGMEWVARIRSKYNNYATYYADAVKDRFTISRD |
| | | | DSKNTLYLQMNNLKTEDTAVYYCVRAGNFGTSYISYWAYWGQGTLVTVSSGGGGSGGG |
| | | | GSGGGGSQTVVTQEPSLTVSPGGTVTITCGSSTGAVTSGNYPNWVQKKPGQAPRGLIG |
| | | | GTKFLAPGTPARFSGSLSGGKAALTLSGVQPEDEAEYYCVLWYSNRWVFGSGTKLTVL |
| | | | GGGGDKTHTCPPCPAPELLGGPSVFLFPPKPKDTLMISRTPEVTCVVVDVSHEDPEVK |
| | | | FNWYVDGVEVHNAKTKPCEEQYGSTYRCVSVLTVLHQDWLNGKEYKCKVSNKALPAPI |
| | | | EKTISKAKGQPREPQVYTLPPSREEMTKNQVSLTCLVKGFYPSDIAVEWESNGQPENN |
| | | | YKTTPPVLDSDGSFFLYSKLTVDKSRWQQGNVFSCSVMHEALHNHYTQKSLSLSPGKG |
| | | | GGGSGGGGSGGGGSGGGGSGGGGSGGGGSDKTHTCPPCPAPELLGGPSVFLFPPKPKD |
| | | | TLMISRTPEVTCVVVDVSHEDPEVKFNWYVDGVEVHNAKTKPCEEQYGSTYRCVSVLT |
| | | | VLHQDWLNGKEYKCKVSNKALPAPIEKTISKAKGQPREPQVYTLPPSREEMTKNQVSL |
| | | | TCLVKGFYPSDIAVEWESNGQPENNYKTTPPVLDSDGSFFLYSKLTVDKSRWQQGNVF |
| | | | SCSVMHEALHNHYTQKSLSLSPGK |
| 2528 | FL 7-A8 CC | artificial | QVTLKESGPTLVKPTETLTLTCTLSGFSLNNARMGVSWIRQPPGKCLEWLAHIFSNDE |
| | xCD123 24- | | KSYSTSLKNRLTISKDSSKTQVVLTMTNVDPVDTATYYCARIVGYGSGWYGFFDYWGQ |
| | B4-f NK CC | | GTLVTVSSGGGGSGGGGSGGGGSDIQMTQSPSSLSASVGDRVTITCRASQGIRNDLGW |
| | x I2M2 X | | YQQKPGKAPKRLIYAASTLQSGVPSRFSGSGSGTEFTLTISSLQPEDFATYYCLQHNS |
| | scFc-Full | | YPLTFGCGTKVEIKSGGGGSEVQLLESGGGLVQPGGSLRLSCAASGFTFSHYAMSWVR |
| | Sequence | | QAPGKCLEWVSAVSGGGDKTLYADAVKGRFTISRDNSKNTLFLQMNSLRAEDTAIYYC |
| | | | ARLRGFYYGMDVWGQGTTVTVSSGGGGSGGGGSGGGGSDIVLTQSPLSLPVTPGEPAS |
| | | | ISCRSSQSLLHSNKYNYLDWYLQKPGQSPQLLIYLGSNRASGVPDRFSGSGSGTDFTL |
| | | | KISRVEAEDVGVYYCMQALQTPPITFGCGTRLEIKSGGGGSEVQLVESGGGLVQPGGS |
| | | | LKLSCAASGFTFNKYAINWVREAPGKGLEWVARIRSKYNNYATYYADAVKDRFTISRD |
| | | | DSKNTAYLQMNNLKTEDTAVYYCVRNANFGTSYISYFAYWGQGTLVTVSSGGGGSGGG |
| | | | GSGGGGSQTVVTQEPSLTVSPGGTVTLTCGSSTGAVTSGNYPNWVQKKPGQAPRGLIG |
| | | | GTKFLAPGTPARFSGSLLGGKAALTLSGVQPEDEAEYYCVLWYSNRWVFGSGTKLTVL |
| | | | GGGGDKTHTCPPCPAPELLGGPSVFLFPPKPKDTLMISRTPEVTCVVVDVSHEDPEVK |
| | | | FNWYVDGVEVHNAKTKPCEEQYGSTYRCVSVLTVLHQDWLNGKEYKCKVSNKALPAPI |
| | | | EKTISKAKGQPREPQVYTLPPSREEMTKNQVSLTCLVKGFYPSDIAVEWESNGQPENN |
| | | | YKTTPPVLDSDGSFFLYSKLTVDKSRWQQGNVFSCSVMHEALHNHYTQKSLSLSPGKG |
| | | | GGGSGGGGSGGGGSGGGGSGGGGSGGGGSDKTHTCPPCPAPELLGGPSVFLFPPKPKD |
| | | | TLMISRTPEVTCVVVDVSHEDPEVKFNWYVDGVEVHNAKTKPCEEQYGSTYRCVSVLT |
| | | | VLHQDWLNGKEYKCKVSNKALPAPIEKTISKAKGQPREPQVYTLPPSREEMTKNQVSL |
| | | | TCLVKGFYPSDIAVEWESNGQPENNYKTTPPVLDSDGSFFLYSKLTVDKSRWQQGNVF |
| | | | SCSVMHEALHNHYTQKSLSLSPGK |
| 2529 | CH3 15-E11 | artificial | QVQLVQSGAEVKKPGASVKVSCKASGYTFTNYWMNWVRQAPGQCLEWMGNIAYGVKGT |
| | CC x I2Lopt | | NYNQKFQGRVTMTVDTSSSTAYMELSRLRSDDTAVYYCATRYFYVMDYWGQGTLVTVS |
| | x G4 x scFc | | SGGGGQGGGGQGGGGQDIQMTQSPSSLSASVGDRVTITCRASQDISNYLNWYQQKPGK |
| | x G4 x MS | | VPKLLIYYTSRLHSGVPSRFSGSGSGTDFTLTISSLQPEDVATYYCVQYAQFPLTFGC |
| | 15-B12 CC x | | GTKVEIKSGGGGQEVQLVESGGGLVQPGGSLKLSCAASGFTFNKYAMNWVRQAPGKGM |
| | I2L GQ | | EWVARIRSKYNNYATYYADAVKDRFTISRDDSKNTLYLQMNNLKTEDTAVYYCVRAGN |
| | 27109-1- | | FGSSYISYFAYWGQGTLVTVSSGGGGQGGGGQGGGGQQTVVTQEPSLTVSPGGTVTIT |
| | Full | | CGSSTGAVTSGNYPNWIQKKPGQAPRGLIGGTKFLAPGTPARFSGSLEGGKAALTLSG |
| | Sequence | | VQPEDEAEYYCVLYYSNRWVFGSGTKLTVLGGGGCPPCPAPELLGGPSVFLFPPKPKD |
| | | | TLMISRTPEVTCVVVDVSHEEPEVKENWYVDGVEVHNAKTKPCEEQYGSTYRCVSVLT |
| | | | VLHQDWLNGKEYKCKVSNKALPAPIEKTISKAKGQPREPQVYTLPPSREEMTKNQVSL |
| | | | TCLVKGFYPSDIAVEWESNGQPENNYKTTPPVLDSDGSFFLYSKLTVDKSRWQQGNVF |
| | | | SCSVMHEALHNHYTQKSLSLSPGKGGGGQGGGGQGGGGQGGGGQGGGGQGGGGQCPPC |
| | | | PAPELLGGPSVFLFPPKPKDTLMISRTPEVTCVVVDVSHEEPEVKENWYVDGVEVHNA |
| | | | KTKPCEEQYGSTYRCVSVLTVLHQDWLNGKEYKCKVSNKALPAPIEKTISKAKGQPRE |
| | | | PQVYTLPPSREEMTKNQVSLTCLVKGFYPSDIAVEWESNGQPENNYKTTPPVLDSDGS |
| | | | FFLYSKLTVDKSRWQQGNVFSCSVMHEALHNHYTQKSLSLSPGKGGGGQVQLQESGPG |
| | | | LVKPSETLSLTCTVSGGSISSSSYFWGWIRQPPGKCLEWIGNIYYSGSSNYNPSLKSR |
| | | | VTISVDTSKNQFSLKLSSVTAADTAVYYCARLPRGDRDAFDIWGQGTMVTVSSGGGGQ |
| | | | GGGGQGGGGQDIVMTQSPSSLSASVGDRVTITCRASQGISNYLAWYQQKPGKVPKLLI |
| | | | YAASTLQSGVPSRFSGSGSGTDFTLTISSLQPEDFATYYCQQSYSTPFTFGCGTKVEI |
| | | | KSGGGGQEVQLVESGGGLVQPGGSLKLSCAASGFTFNKYAMNWVRQAPGKGMEWVARI |
| | | | RSKYNNYATYYADAVKDRFTISRDDSKNTLYLQMNNLKTEDTAVYYCVRAGNFGSSYI |
| | | | SYFAYWGQGTLVTVSSGGGGQGGGGQGGGGQQTVVTQEPSLTVSPGGTVTITCGSSTG |
| | | | AVTSGNYPNWIQKKPGQAPRGLIGGTKFLAPGTPARFSGSLEGGKAALTLSGVQPEDE |
| | | | AEYYCVLYYSNRWVFGSGTKLTVL |
| 2530 | CH3 15-E11 | artificial | QVQLVQSGAEVKKPGASVKVSCKASGYTFTNYWMNWVRQAPGQCLEWMGNIAYGVKGT |
| | CC x | | NYNQKFQGRVTMTVDTSSSTAYMELSRLRSDDTAVYYCATRYFYVMDYWGQGTLVTVS |
| | I2M2opt x | | SGGGGQGGGGQGGGGQDIQMTQSPSSLSASVGDRVTITCRASQDISNYLNWYQQKPGK |
| | G4 x scFc x | | VPKLLIYYTSRLHSGVPSRFSGSGSGTDFTLTISSLQPEDVATYYCVQYAQFPLTFGC |
| | G4 x MS 15- | | GTKVEIKSGGGGQEVQLVESGGGLVQPGGSLKLSCAASGFTENKYAINWVREAPGKGL |
| | B12 CC x | | EWVARIRSKYNNYATYYADAVKDRFTISRDDSKNTAYLQMNNLKTEDTAVYYCVRNAN |
| | I2M2_GQ | | FGTSYISYFAYWGQGTLVTVSSGGGGSGGGGSGGGGSQTVVTQEPSLTVSPGGTVTLT |
| | 27109-1- | | CGSSTGAVTSGNYPNWVQKKPGQAPRGLIGGTKFLAPGTPARFSGSLLGGKAALTLSG |
| | Full | | VQPEDEAEYYCVLWYSNRWVFGSGTKLTVLGGGGCPPCPAPELLGGPSVFLFPPKPKD |
| | Sequence | | TLMISRTPEVTCVVVDVSHEEPEVKFNWYVDGVEVHNAKTKPCEEQYGSTYRCVSVLT |
| | | | VLHQDWLNGKEYKCKVSNKALPAPIEKTISKAKGQPREPQVYTLPPSREEMTKNQVSL |
| | | | TCLVKGFYPSDIAVEWESNGQPENNYKTTPPVLDSDGSFFLYSKLTVDKSRWQQGNVF |
| | | | SCSVMHEALHNHYTQKSLSLSPGKGGGGQGGGGQGGGGQGGGGQGGGGQGGGGQCPPC |
| | | | PAPELLGGPSVFLFPPKPKDTLMISRTPEVTCVVVDVSHEEPEVKENWYVDGVEVHNA |
| | | | KTKPCEEQYGSTYRCVSVLTVLHQDWLNGKEYKCKVSNKALPAPIEKTISKAKGQPRE |
| | | | PQVYTLPPSREEMTKNQVSLTCLVKGFYPSDIAVEWESNGQPENNYKTTPPVLDSDGS |
| | | | FFLYSKLTVDKSRWQQGNVFSCSVMHEALHNHYTQKSLSLSPGKGGGGQVQLQESGPG |
| | | | LVKPSETLSLTCTVSGGSISSSSYFWGWIRQPPGKCLEWIGNIYYSGSSNYNPSLKSR |
| | | | VTISVDTSKNQFSLKLSSVTAADTAVYYCARLPRGDRDAFDIWGQGTMVTVSSGGGGQ |
| | | | GGGGQGGGGQDIVMTQSPSSLSASVGDRVTITCRASQGISNYLAWYQQKPGKVPKLLI |
| | | | YAASTLQSGVPSRFSGSGSGTDFTLTISSLQPEDFATYYCQQSYSTPFTFGCGTKVEI |
| | | | KSGGGGQEVQLVESGGGLVQPGGSLKLSCAASGFTFNKYAINWVREAPGKGLEWVARI |
| | | | RSKYNNYATYYADAVKDRFTISRDDSKNTAYLQMNNLKTEDTAVYYCVRNANFGTSYI |
| | | | SYFAYWGQGTLVTVSSGGGGSGGGGSGGGGSQTVVTQEPSLTVSPGGTVTLTCGSSTG |
| | | | AVTSGNYPNWVQKKPGQAPRGLIGGTKFLAPGTPARFSGSLLGGKAALTLSGVQPEDE |
| | | | AEYYCVLWYSNRWVFGSGTKLTVL |
| 2531 | MS R4L CC x | artificial | QVQLVQSGAEVKKPGASVKVSCKASGYTFTGYYIHWVRQAPGQCLEWMGWINPNSGGT |
| | CH3 R170R | | NYAQKFQGRVTMTRDTSISTAYMELSRLRSDDTAVYYCARVEAVAGREYYYFSGMDVW |
| | CC x I2C x | | GQGTTVTVSSGGGGSGGGGSGGGGSSYELTQPPSVSVSPGQTASITCSGEKLGDKYVY |
| | scFc-Full | | WYQQKPGQSPVLVIYQSTKRPSGVPERFSGSNSGNTATLTISGTQAMDEADYYCQAYH |
| | Sequence | | ASTAVFGCGTKLTVLSGGGGSEVQLLESGGGLVQPGGSLRLSCAASGFTFSSYWMHWV |
| | | | RQTPGKCLEWVSKIDPSDDYTNYNQKVKGRFTISIDKSKNTLYLQMNSLRAEDTAVYY |
| | | | CARWDYSHFDVWGQGTTVTVSSGGGGSGGGGSGGGGSEIVMTQSPATLSVSPGERATL |
| | | | TCRASSSVSYMHWYQQKPGQAPRLLIYGTSNLVSGVPARFSGSGSGTEFTLTISSLQS |
| | | | EDFAVYYCQQWSSYPLTFGCGTKVEIKSGGGGSEVQLVESGGGLVQPGGSLKLSCAAS |
| | | | GFTFNKYAMNWVRQAPGKGLEWVARIRSKYNNYATYYADSVKDRFTISRDDSKNTAYL |
| | | | QMNNLKTEDTAVYYCVRHGNFGNSYISYWAYWGQGTLVTVSSGGGGSGGGGSGGGGSQ |
| | | | TVVTQEPSLTVSPGGTVTLTCGSSTGAVTSGNYPNWVQQKPGQAPRGLIGGTKFLAPG |
| | | | TPARFSGSLLGGKAALTLSGVQPEDEAEYYCVLWYSNRWVFGGGTKLTVLGGGGDKTH |
| | | | TCPPCPAPELLGGPSVFLFPPKPKDTLMISRTPEVTCVVVDVSHEDPEVKENWYVDGV |
| | | | EVHNAKTKPCEEQYGSTYRCVSVLTVLHQDWLNGKEYKCKVSNKALPAPIEKTISKAK |
| | | | GQPREPQVYTLPPSREEMTKNQVSLTCLVKGFYPSDIAVEWESNGQPENNYKTTPPVL |
| | | | DSDGSFFLYSKLTVDKSRWQQGNVFSCSVMHEALHNHYTQKSLSLSPGKGGGGSGGGG |
| | | | SGGGGSGGGGSGGGGSGGGGSDKTHTCPPCPAPELLGGPSVFLFPPKPKDTLMISRTP |
| | | | EVTCVVVDVSHEDPEVKFNWYVDGVEVHNAKTKPCEEQYGSTYRCVSVLTVLHQDWLN |
| | | | GKEYKCKVSNKALPAPIEKTISKAKGQPREPQVYTLPPSREEMTKNQVSLTCLVKGFY |
| | | | PSDIAVEWESNGQPENNYKTTPPVLDSDGSFFLYSKLTVDKSRWQQGNVFSCSVMHEA |
| | | | LHNHYTQKSLSLSPGK |
| 2532 | MS R4L CC x | artificial | QVQLVQSGAEVKKPGASVKVSCKASGYTFTGYYIHWVRQAPGQCLEWMGWINPNSGGT |
| | CH3 R170R | | NYAQKFQGRVTMTRDTSISTAYMELSRLRSDDTAVYYCARVEAVAGREYYYFSGMDVW |
| | CC x I2E x | | GQGTTVTVSSGGGGSGGGGSGGGGSSYELTQPPSVSVSPGQTASITCSGEKLGDKYVY |
| | scFc-Full | | WYQQKPGQSPVLVIYQSTKRPSGVPERFSGSNSGNTATLTISGTQAMDEADYYCQAYH |
| | Sequence | | ASTAVFGCGTKLTVLSGGGGSEVQLLESGGGLVQPGGSLRLSCAASGFTFSSYWMHWV |
| | | | RQTPGKCLEWVSKIDPSDDYTNYNQKVKGRFTISIDKSKNTLYLQMNSLRAEDTAVYY |
| | | | CARWDYSHFDVWGQGTTVTVSSGGGGSGGGGSGGGGSEIVMTQSPATLSVSPGERATL |
| | | | TCRASSSVSYMHWYQQKPGQAPRLLIYGTSNLVSGVPARFSGSGSGTEFTLTISSLQS |
| | | | EDFAVYYCQQWSSYPLTFGCGTKVEIKSGGGGSEVQLVESGGGLVQPGGSLKLSCAAS |
| | | | GFTFNKYAINWVRQAPGKGLEWVARIRSKYNNYATYYADAVKDRFTISRDDSKNTVYL |
| | | | QMNNLKTEDTAVYYCARAGNFGSSYISYWAYWGQGTLVTVSSGGGGSGGGGSGGGGSQ |
| | | | TVVTQEPSLTVSPGGTVTITCGSSTGAVTSGNYPNWVQKKPGQAPRGLIGGTKFLAPG |
| | | | TPARFSGSLSGGKAALTLSGVQPEDEAEYYCVLWYSNRWVFGSGTKLTVLGGGGDKTH |
| | | | TCPPCPAPELLGGPSVFLFPPKPKDTLMISRTPEVTCVVVDVSHEDPEVKENWYVDGV |
| | | | EVHNAKTKPCEEQYGSTYRCVSVLTVLHQDWLNGKEYKCKVSNKALPAPIEKTISKAK |
| | | | GQPREPQVYTLPPSREEMTKNQVSLTCLVKGFYPSDIAVEWESNGQPENNYKTTPPVL |
| | | | DSDGSFFLYSKLTVDKSRWQQGNVFSCSVMHEALHNHYTQKSLSLSPGKGGGGSGGGG |
| | | | SGGGGSGGGGSGGGGSGGGGSDKTHTCPPCPAPELLGGPSVFLFPPKPKDTLMISRTP |
| | | | EVTCVVVDVSHEDPEVKFNWYVDGVEVHNAKTKPCEEQYGSTYRCVSVLTVLHQDWLN |
| | | | GKEYKCKVSNKALPAPIEKTISKAKGQPREPQVYTLPPSREEMTKNQVSLTCLVKGFY |
| | | | PSDIAVEWESNGQPENNYKTTPPVLDSDGSFFLYSKLTVDKSRWQQGNVFSCSVMHEA |
| | | | LHNHYTQKSLSLSPGK |
| 2533 | MS R4L CC x | artificial | QVQLVQSGAEVKKPGASVKVSCKASGYTFTGYYIHWVRQAPGQCLEWMGWINPNSGGT |
| | CH3 R170R | | NYAQKFQGRVTMTRDTSISTAYMELSRLRSDDTAVYYCARVEAVAGREYYYFSGMDVW |
| | CC x I2K x | | GQGTTVTVSSGGGGSGGGGSGGGGSSYELTQPPSVSVSPGQTASITCSGEKLGDKYVY |
| | scFc-Full | | WYQQKPGQSPVLVIYQSTKRPSGVPERFSGSNSGNTATLTISGTQAMDEADYYCQAYH |
| | Sequence | | ASTAVFGCGTKLTVLSGGGGSEVQLLESGGGLVQPGGSLRLSCAASGFTFSSYWMHWV |
| | | | RQTPGKCLEWVSKIDPSDDYTNYNQKVKGRFTISIDKSKNTLYLQMNSLRAEDTAVYY |
| | | | CARWDYSHFDVWGQGTTVTVSSGGGGSGGGGSGGGGSEIVMTQSPATLSVSPGERATL |
| | | | TCRASSSVSYMHWYQQKPGQAPRLLIYGTSNLVSGVPARFSGSGSGTEFTLTISSLQS |
| | | | EDFAVYYCQQWSSYPLTFGCGTKVEIKSGGGGSEVQLVESGGGLVQPGGSLKLSCAAS |
| | | | GFTFNKYAMNWVRQAPGKGLEWVARIRSKYNNYATYYAEAVKGRFTISRDDSKNTVYL |
| | | | QMNNLKTEDTAVYYCVRNENIGTSYISYWAYWGQGTLVTVSSGGGGSGGGGSGGGGSQ |
| | | | TVVTQEPSLTVSPGGTVTITCGSSTGAVTSGNYPNWVQQKPGQAPRGLIGGTKFLAPG |
| | | | TPARFSGSLSGGKAALTLSGVQPEDEAEYYCVLWYSNRWVFGSGTKLTVLGGGGDKTH |
| | | | TCPPCPAPELLGGPSVFLFPPKPKDTLMISRTPEVTCVVVDVSHEDPEVKENWYVDGV |
| | | | EVHNAKTKPCEEQYGSTYRCVSVLTVLHQDWLNGKEYKCKVSNKALPAPIEKTISKAK |
| | | | GQPREPQVYTLPPSREEMTKNQVSLTCLVKGFYPSDIAVEWESNGQPENNYKTTPPVL |
| | | | DSDGSFFLYSKLTVDKSRWQQGNVFSCSVMHEALHNHYTQKSLSLSPGKGGGGSGGGG |
| | | | SGGGGSGGGGSGGGGSGGGGSDKTHTCPPCPAPELLGGPSVFLFPPKPKDTLMISRTP |
| | | | EVTCVVVDVSHEDPEVKFNWYVDGVEVHNAKTKPCEEQYGSTYRCVSVLTVLHQDWLN |
| | | | GKEYKCKVSNKALPAPIEKTISKAKGQPREPQVYTLPPSREEMTKNQVSLTCLVKGFY |
| | | | PSDIAVEWESNGQPENNYKTTPPVLDSDGSFFLYSKLTVDKSRWQQGNVFSCSVMHEA |
| | | | LHNHYTQKSLSLSPGK |
| 2534 | MS R4L CC x | artificial | QVQLVQSGAEVKKPGASVKVSCKASGYTFTGYYIHWVRQAPGQCLEWMGWINPNSGGT |
| | CH3 R170R | | NYAQKFQGRVTMTRDTSISTAYMELSRLRSDDTAVYYCARVEAVAGREYYYFSGMDVW |
| | CC x I2L x | | GQGTTVTVSSGGGGSGGGGSGGGGSSYELTQPPSVSVSPGQTASITCSGEKLGDKYVY |
| | scFc-Full | | WYQQKPGQSPVLVIYQSTKRPSGVPERFSGSNSGNTATLTISGTQAMDEADYYCQAYH |
| | Sequence | | ASTAVFGCGTKLTVLSGGGGSEVQLLESGGGLVQPGGSLRLSCAASGFTFSSYWMHWV |
| | | | RQTPGKCLEWVSKIDPSDDYTNYNQKVKGRFTISIDKSKNTLYLQMNSLRAEDTAVYY |
| | | | CARWDYSHFDVWGQGTTVTVSSGGGGSGGGGSGGGGSEIVMTQSPATLSVSPGERATL |
| | | | TCRASSSVSYMHWYQQKPGQAPRLLIYGTSNLVSGVPARFSGSGSGTEFTLTISSLQS |
| | | | EDFAVYYCQQWSSYPLTFGCGTKVEIKSGGGGSEVQLVESGGGLVQPGGSLKLSCAAS |
| | | | GFTFNKYAMNWVRQAPGKGMEWVARIRSKYNNYATYYADAVKDRFTISRDDSKNTLYL |
| | | | QMNNLKTEDTAVYYCVRAGNFGSSYISYFAYWGQGTLVTVSSGGGGSGGGGSGGGGSQ |
| | | | TVVTQEPSLTVSPGGTVTITCGSSTGAVTSGNYPNWIQKKPGQAPRGLIGGTKFLAPG |
| | | | TPARFSGSLEGGKAALTLSGVQPEDEAEYYCVLYYSNRWVFGSGTKLTVLGGGGDKTH |
| | | | TCPPCPAPELLGGPSVFLFPPKPKDTLMISRTPEVTCVVVDVSHEDPEVKENWYVDGV |
| | | | EVHNAKTKPCEEQYGSTYRCVSVLTVLHQDWLNGKEYKCKVSNKALPAPIEKTISKAK |
| | | | GQPREPQVYTLPPSREEMTKNQVSLTCLVKGFYPSDIAVEWESNGQPENNYKTTPPVL |
| | | | DSDGSFFLYSKLTVDKSRWQQGNVFSCSVMHEALHNHYTQKSLSLSPGKGGGGSGGGG |
| | | | SGGGGSGGGGSGGGGSGGGGSDKTHTCPPCPAPELLGGPSVFLFPPKPKDTLMISRTP |
| | | | EVTCVVVDVSHEDPEVKFNWYVDGVEVHNAKTKPCEEQYGSTYRCVSVLTVLHQDWLN |
| | | | GKEYKCKVSNKALPAPIEKTISKAKGQPREPQVYTLPPSREEMTKNQVSLTCLVKGFY |
| | | | PSDIAVEWESNGQPENNYKTTPPVLDSDGSFFLYSKLTVDKSRWQQGNVFSCSVMHEA |
| | | | LHNHYTQKSLSLSPGK |
| 2535 | MS R4L CC x | artificial | QVQLVQSGAEVKKPGASVKVSCKASGYTFTGYYIHWVRQAPGQCLEWMGWINPNSGGT |
| | CH3 R170R | | NYAQKFQGRVTMTRDTSISTAYMELSRLRSDDTAVYYCARVEAVAGREYYYFSGMDVW |
| | CC x I2M x | | GQGTTVTVSSGGGGSGGGGSGGGGSSYELTQPPSVSVSPGQTASITCSGEKLGDKYVY |
| | scFc-Full | | WYQQKPGQSPVLVIYQSTKRPSGVPERFSGSNSGNTATLTISGTQAMDEADYYCQAYH |
| | Sequence | | ASTAVFGCGTKLTVLSGGGGSEVQLLESGGGLVQPGGSLRLSCAASGFTFSSYWMHWV |
| | | | RQTPGKCLEWVSKIDPSDDYTNYNQKVKGRFTISIDKSKNTLYLQMNSLRAEDTAVYY |
| | | | CARWDYSHFDVWGQGTTVTVSSGGGGSGGGGSGGGGSEIVMTQSPATLSVSPGERATL |
| | | | TCRASSSVSYMHWYQQKPGQAPRLLIYGTSNLVSGVPARFSGSGSGTEFTLTISSLQS |
| | | | EDFAVYYCQQWSSYPLTFGCGTKVEIKSGGGGSEVQLVESGGGLVQPGGSLKLSCAAS |
| | | | GFTFNKYAMNWVRQAPGKGMEWVARIRSKYNNYATYYADAVKDRFTISRDDSKNTLYL |
| | | | QMNNLKTEDTAVYYCVRAGNFGTSYISYWAYWGQGTLVTVSSGGGGSGGGGSGGGGSQ |
| | | | TVVTQEPSLTVSPGGTVTITCGSSTGAVTSGNYPNWVQKKPGQAPRGLIGGTKFLAPG |
| | | | TPARFSGSLSGGKAALTLSGVQPEDEAEYYCVLWYSNRWVFGSGTKLTVLGGGGDKTH |
| | | | TCPPCPAPELLGGPSVFLFPPKPKDTLMISRTPEVTCVVVDVSHEDPEVKENWYVDGV |
| | | | EVHNAKTKPCEEQYGSTYRCVSVLTVLHQDWLNGKEYKCKVSNKALPAPIEKTISKAK |
| | | | GQPREPQVYTLPPSREEMTKNQVSLTCLVKGFYPSDIAVEWESNGQPENNYKTTPPVL |
| | | | DSDGSFFLYSKLTVDKSRWQQGNVFSCSVMHEALHNHYTQKSLSLSPGKGGGGSGGGG |
| | | | SGGGGSGGGGSGGGGSGGGGSDKTHTCPPCPAPELLGGPSVFLFPPKPKDTLMISRTP |
| | | | EVTCVVVDVSHEDPEVKFNWYVDGVEVHNAKTKPCEEQYGSTYRCVSVLTVLHQDWLN |
| | | | GKEYKCKVSNKALPAPIEKTISKAKGQPREPQVYTLPPSREEMTKNQVSLTCLVKGFY |
| | | | PSDIAVEWESNGQPENNYKTTPPVLDSDGSFFLYSKLTVDKSRWQQGNVFSCSVMHEA |
| | | | LHNHYTQKSLSLSPGK |
| 2536 | MS R4L CC x | artificial | QVQLVQSGAEVKKPGASVKVSCKASGYTFTGYYIHWVRQAPGQCLEWMGWINPNSGGT |
| | CH3 R170R | | NYAQKFQGRVTMTRDTSISTAYMELSRLRSDDTAVYYCARVEAVAGREYYYFSGMDVW |
| | CC x I2M2 x | | GQGTTVTVSSGGGGSGGGGSGGGGSSYELTQPPSVSVSPGQTASITCSGEKLGDKYVY |
| | scFc-Full | | WYQQKPGQSPVLVIYQSTKRPSGVPERFSGSNSGNTATLTISGTQAMDEADYYCQAYH |
| | Sequence | | ASTAVFGCGTKLTVLSGGGGSEVQLLESGGGLVQPGGSLRLSCAASGFTFSSYWMHWV |
| | | | RQTPGKCLEWVSKIDPSDDYTNYNQKVKGRFTISIDKSKNTLYLQMNSLRAEDTAVYY |
| | | | CARWDYSHFDVWGQGTTVTVSSGGGGSGGGGSGGGGSEIVMTQSPATLSVSPGERATL |
| | | | TCRASSSVSYMHWYQQKPGQAPRLLIYGTSNLVSGVPARFSGSGSGTEFTLTISSLQS |
| | | | EDFAVYYCQQWSSYPLTFGCGTKVEIKSGGGGSEVQLVESGGGLVQPGGSLKLSCAAS |
| | | | GFTFNKYAINWVREAPGKGLEWVARIRSKYNNYATYYADAVKDRFTISRDDSKNTAYL |
| | | | QMNNLKTEDTAVYYCVRNANFGTSYISYFAYWGQGTLVTVSSGGGGSGGGGSGGGGSQ |
| | | | TVVTQEPSLTVSPGGTVTLTCGSSTGAVTSGNYPNWVQKKPGQAPRGLIGGTKFLAPG |
| | | | TPARFSGSLLGGKAALTLSGVQPEDEAEYYCVLWYSNRWVFGSGTKLTVLGGGGDKTH |
| | | | TCPPCPAPELLGGPSVFLFPPKPKDTLMISRTPEVTCVVVDVSHEDPEVKENWYVDGV |
| | | | EVHNAKTKPCEEQYGSTYRCVSVLTVLHQDWLNGKEYKCKVSNKALPAPIEKTISKAK |
| | | | GQPREPQVYTLPPSREEMTKNQVSLTCLVKGFYPSDIAVEWESNGQPENNYKTTPPVL |
| | | | DSDGSFFLYSKLTVDKSRWQQGNVFSCSVMHEALHNHYTQKSLSLSPGKGGGGSGGGG |
| | | | SGGGGSGGGGSGGGGSGGGGSDKTHTCPPCPAPELLGGPSVFLFPPKPKDTLMISRTP |
| | | | EVTCVVVDVSHEDPEVKFNWYVDGVEVHNAKTKPCEEQYGSTYRCVSVLTVLHQDWLN |
| | | | GKEYKCKVSNKALPAPIEKTISKAKGQPREPQVYTLPPSREEMTKNQVSLTCLVKGFY |
| | | | PSDIAVEWESNGQPENNYKTTPPVLDSDGSFFLYSKLTVDKSRWQQGNVFSCSVMHEA |
| | | | LHNHYTQKSLSLSPGK |
| 2551 | (G4Q)3- | artificial | GGGGQGGGGQGGGGQ |
| | Linker | | |
| 2552 | Human | artificial | QDGNEEMGGITQTPYKVSISGTTVILTCPQYPGSEILWQHNDKNIGGDEDDKNIGSDE |
| | CD3epsilon | | DHLSLKEFSELEQSGYYVCYPRGSKPEDANFYLYLRARVCENCMEMD |
| | ECD | | |
| 2553 | Human | artificial | QDGNEEMGGITQTPYKVSISGTTVILT |
| | CD3epsilon | | |
| | ECD/pos. | | |
| | 1-27 | | |
| 2554 | I2C_HC_H109A- | artificial | KYAMN |
| | HCDR1 | | |
| 2555 | I2C_HC_H109A- | artificial | RIRSKYNNYATYYADSVKD |
| | HCDR2 | | |
| 2556 | I2C_HC_H109A- | artificial | AGNFGNSYISYWAY |
| | HCDR3 | | |
| 2557 | I2C_HC_H109A- | artificial | GSSTGAVTSGNYPN |
| | LCDR1 | | |
| 2558 | I2C_HC_H109A- | artificial | GTKFLAP |
| | LCDR2 | | |
| 2559 | I2C_HC_H109A- | artificial | VLWYSNRWV |
| | LCDR3 | | |
| 2560 | I2C_HC_H109A- | artificial | EVQLVESGGGLVQPGGSLKLSCAASGFTFNKYAMNWVRQAPGKGLEWVARIRSKYNNY |
| | VH | | ATYYADSVKDRFTISRDDSKNTAYLQMNNLKTEDTAVYYCVRAGNFGNSYISYWAYWG |
| | | | QGTLVTVSS |
| 2561 | I2C_HC_H109A- | artificial | QTVVTQEPSLTVSPGGTVTLTCGSSTGAVTSGNYPNWVQQKPGQAPRGLIGGTKFLAP |
| | VL | | GTPARFSGSLLGGKAALTLSGVQPEDEAEYYCVLWYSNRWVFGGGTKLTVL |

1. A polypeptide or polypeptide construct comprising:
a binding domain binding to an extracellular epitope of the human CD3ε chain comprising or consisting of a VH region and a VL region, wherein
i) the VH region comprises:
a CDR-H1 sequence of X₁YAX₂N, where X, is K, V, S, G, R, T, or I; and X₂ is M or I;
a CDR-H2 sequence of RIRSKYNNYATYYADX₁VKX₂, where X, is S or Q; and X₂ is D, G, K, S, or E; and
a CDR-H3 sequence of HX₁NFGNSYX₂SX₃X₄AY, where X, is G, R, or A; X₂ is I, L, V, or T; X₃ is Y, W or F; and X₄ is W, F or Y; and
ii) wherein the VL region comprises:
a CDR-L1 sequence of X₁SSTGAVTX₂X₃X₄YX₅N, where X, is G, R, or A; X₂ is S or T; X₃ is G or S; X₄ is N or Y; and X₅ is P or A;
a CDR-L2 sequence of X₁TX₂X₃X₄X₅X₆; where X, is G or A; X₂ is K, D, or N; X₃ is F, M or K; X₄ is L or R; X₅ is A, P, or V; and X₆ is P or S; and
a CDR-L3 sequence of X₁LWYSNX₂WV, where X, is V, A, or T; and X₂ is R or L; and
iii) wherein one or more of CDR sequences of the VH region of i) and/or of the VL region of ii) comprise one amino acid substitution or a combination thereof selected from X₂4V and X₂4F in CDR-H1;
D15, and X₁16A in CDR-H2;
H1, X₁2E, F4, and N6 in CDR-H3; and
X₁1L and W3 in CDR-L3.

2. The polypeptide or polypeptide construct of claim 1, wherein in addition to said one amino acid substitution or a combination thereof as defined in iii) X₂ is I in said CDR-H1 sequence; X₂ is G in said CDR-H2 sequence; X₁ is A, X₄ is F in said CDR-H3 sequence; and/or X₁ is A in said CDR-L3 sequence.

3. The polypeptide or polypeptide construct of claim 1 or 2, comprising combinations of said amino acid substitutions as defined in iii) of two, three, four, five, six, seven, eight, nine, ten, eleven, twelve or more amino acid substitutions.

4. The polypeptide or polypeptide construct of any one of claims 1 to 3, wherein:
i) said one amino acid substitution is selected from:
a. X₂4V or X₂4F in CDR-H1; H1A in CDR-H3; and
b. X₁1L and W3Y in CDR-L3;
ii) said combination of two or more amino acid substitutions are selected from X₁16A in CDR-H2 and N6S in CDR-H3; and X₁16A in CDR-H2 and N6T in CDR-H3;
iii) said combination of three or more amino acid substitutions are selected from X₁16A in CDR-H2, H1A and N6S in CDR-H3; X₁16A in CDR-H2, H1A and N6T in CDR-H3; X₁16A in CDR-H2, H1N and N6T in CDR-H3;
iv) said combination of four or more amino acid substitutions are selected from X₁16A in CDR-H2, H1A, N6S in CDR-H3, and W3Y in CDR-L3; D15E, X₁16A in CDR-H2, H1A, and N6T in CDR-H3; D15E, X₁16A in CDR-H2, H1A, and N6S in CDR-H3; X₁16A in CDR-H2, H1A, F41 and N6S in CDR-H3; or
v) said combination of five or six amino acid substitutions are selected from X₁16A in CDR-H2, H1A, X₁2E, F41, and N6T in CDR-H3; X₁16A in CDR-H2, H1N, X₁2E, F41, and N6S in CDR-H3; D15E, X₁16A in CDR-H2, H1A, N6S in CDR-H3; and W3Y in CDR-L3; D15E, X₁16A in CDR-H2, H1N, X₁2E, F41 and N6T in CDR-H3; D15E, X₁16A in CDR-H2, H1A, X₁2E, F41 and N6T in CDR-H3; D15E, X₁16A in CDR-H2, X₁2E, F41 and N6T in CDR-H3.

5. A polypeptide or polypeptide construct comprising: a binding domain binding to an extracellular epitope of the human CD3ε chain comprising or consisting of a VH region and a VL region, wherein
i) the VH region comprises the sequence of EVX₁LX₂ESGGGLX₃QPX₄GSLKLSCAASGFTFNX₅YAX₆NWVRQAPGKGLEWVAR IRSKYNNYATYYADX₇VKX₈RFTISRDDSXX₁₀X₁₁X₁₂YLQMNNLKTEDTAX₁₃YYCV RHX₁₄NFGNSYX₁₅SX₁₆X₁₇AYWGQGTLVTVSX₁₈, where X₁ is Q or K; X₂ is V or L; X₃ is V or E; X₄ is G or K; X₅ is K, V, S, G, R, T, or I; X₆ is M or I; X₇ is S or Q; X₈ is D, G, K, S, or E; X₉ is K or Q; X₁₀ is N or S; X₁₁ is T or I; X₁₂ is A or L; X₁₃ is V or M; X₁₄ is G, R or A; X₁₅ is I, L, V, or T; X₁₆ is Y, W or F; X₁₇ is W, F or Y; and X₁₈ is S or A; and
ii) the VL region comprises the sequence of QX₁VVTQEX₂X₃LTX₄SPGX₅TVTLTCX₆SSTGAVTX₇X₈X₉YX₁₀NWVQX₁₁KPX₁₂X₁₃X₁₄X₁₅X₁₆GLIGX₁₇TX₁₈X₁₉X₂₀X₂₁X₂₂GX₂₃PARFSGSLX₂₄GX₂₅KAALTX₂₆X₂₇GX₂₈QX₂₉E DEAX₃₀YX₃₁CX₃₂LWYSNX₃₃WVFGGGTKLTVL, where X₁ is T or A; X₂ is P or S; X₃ is S or A; X₄ is V or T; X₅ is G or E; X₆ is G, R, or A; X₇ is S or T; X₈ is G or S; X₉ is N or Y; X₁₀ is P or A; X₁₁ is Q or E; X₁₂ is G or D; X₁₃ is Q or H; X₁₄ is A or L; X₁₅ is P or F; X₁₆ is R or T; X₁₇ is G or A; X₁₈ is K or D; X₁₉ is F or M; X₂₀ is L or R; X₂₁ is A, P or V; X₂₂ is P or S; X₂₃ is T or V; X₂₄ is L or I; X₂₅ is G or D; X₂₆ is L or I; X₂₇ is S or T; X₂₈ is V or A; X₂₉ is P or T; X₃₀ is E or I; X₃₁ is Y or F; X₃₂ is V, A, or T; X₃₃ is R or L; and
iii) wherein the VH and/or VL region sequence comprises one amino acid substitution or a combination thereof selected from
a. N30, X₆34V, X₆34F, Q39, L45, D64, X₇65A, X₁₂81V, X₁₂81T, X₁₂811, V99, H101, X₁₄102E, F104, and N106 in the VH region sequence in i); and
b. L20, V38, X₁₁40R, X₁₁40K, X₂₄69, X₃₂91L, X₃₃93, and G102 in the VL region sequence in ii).

6. The polypeptide or polypeptide construct of claim 5, wherein in addition to said one amino acid substitution or a combination thereof as defined in iii) X₆ is I; X₈ is G; X₁₂ is L, X₁₄ is A, X₁₇ is F in said VH region sequence; and/or X₃₂ is A in said VL region sequence.

7. The polypeptide or polypeptide construct of claim 5 or 6, comprising combinations of said amino acid substitutions as defined in iii) of two, three, four, five, six, seven, eight, nine, ten, eleven, twelve or more amino acid substitutions.

8. The polypeptide or polypeptide construct of any one of claims 5 to 7, wherein:
i) said one acid substitution is selected from
a. X₆34V, Q39E, Q39K, Q39R, Q39D, L45M, L45V, X₁₂81V, X₁₂81T, X₁₂811, V99A, V99L, H101A, H101N in the VH region; and
b. V381, V38L, V38M, V38F, V38Y, X₁₁40R, X₁₁40K, X₂₄69S, X₂₄69E, X₃₂91L, X₃₃93Y;
ii) said combination of two or more amino acid substitutions are selected from X₆34F and X₁₂81V in the VH region; Q39E in the VH region and X₁₁40K in the VL region;
Q39E in the VH region and X₁₁40R in the VL region; Q39D in the VH region and X₁₁40K in the VL region; Q39D in the VH region and X₁₁40R in the VL region; L45V in the VH region and V38F in the VL region; L45V in the VH region and V38Y in the VL region; L45M in the VH region and X₁₁40K in the VL region; L20I and G102S in the VL region; X₁₂81V in the VH region and X₁₁40K in the VL region;
iii) said combination of three or more amino acid substitutions are selected from Q39E in the VH region, X₁₁40K and G102S in the VL region; Q39E in the VH region, X₁₁40R and G102S in the VL region; Q39D in the VH region, X₁₁40K and G102S in the VL region; Q39D in the VH region, X₁₁40R and G102S in the VL region; L45M in the VH region, X₁₁40K and G102S in the VL region; X₇65A, H101A, and N106S in the VH region; L20I, X₁₁40K, and G102S in the VL region;
iv) said combination of four or more amino acid substitutions are selected from Q39E in the VH region, L20I, X₁₁40K and G102S in the VL region; Q39E in the VH region, L20I, X₁₁40R and G102S in the VL region; Q39D in the VH region, L20I, X₁₁40K and G102S in the VL region; Q39D in the VH region, L20I, X₁₁40R and G102S in the VL region; L45M in the VH region, L20I, X₁₁40K and G102S in the VL region; L20I, X₁₁40K, X₂₄69S, and G102S in the VL region; X₁₂81V in the VH region, L20I, X₁₁40K, and G102S in the VL region;
v) said combination of five, six, seven, eight, nine, ten, or more amino acid substitutions are selected from X₇65A, X₁₂81V, V99A, N106S in the VH region, L20I, X₁₁40K, X₂₄69S, and G102S in the VL region; D64E, X₇65A, X₁₂81V, X₁₄102E, F104I, N106T in the VH region, L20I, X₂₄69S, and G102S in the VL region; L45M, X₇65A, N106T in the VH region, L20I, X₁₁40K, X₂₄69S, and G102S in the VL region; X₇65A, X₁₂81V, V99A, H101A, F104I, N106S in the VH region, L20I, X₁₁40K, X₂₄69S, and G102S in the VL region; X₇65A, X₁₂81V, V99A, H101A, N106S in the VH region; X₁₂81V, V99A in the VH region, L20I, X₁₁40K, X₂₄69S, and G102S in the VL region; Q39E, X₁₂81V in the VH region, L20I, X₁₁40K, and G102S in the VL region; L45V in the VH region, L20I, V38F, X₁₁40K and G102S in the VL region.

9. The polypeptide or polypeptide construct of any one of claims 5 to 8, wherein said combination of amino acid substitutions is selected from:
ii) in the VH region
a. X₇65A, X₁₂81V, V99A, H101A and N106S;
b. D64E, X₇65A, A81V, H101N, X₁₄102E, F104I, and N106S;
c. L45M, X₇65A, H101A, and N106T;
d. L45M, X₇65A, H101A, and N106S;
e. Q39E, X₇65A, H101N, and N106T;
f. D64E, X₇65A, V99A, H101A, and N106T;
g. X₇65A, X₁₂81V, V99A, H101A, X₁₄102E, F104I, and N106T;
h. X₇65A, X₁₂81V, H101N, X₁₄102E, F104I, and N106S;
i. D64E, X₇65A, X₁₂81V, H101A, and N106S;
j. D64E, X₇65A, H101A, and N106T;
k. X₇65A, V99A, H101A, and N106T;
l. D64E, X₇65A, H101A, and N106S;
m. D64E, X₇65A, X₁₂81V, V99A, H101A, and N106S;
n. X₇65A, H101A and N106S;
o. N30S, Q39E, D64E, X₇65A, X₁₂81V, H101A, X₁₄102E, F104I, and N106T;
p. L45M, D64E, X₇65A, H101A, and N106T;
q. N30S, L45M, X₇65A, X₁₂81V, H101A, and N106T;
r. N30S, L45M, D64E, X₇65A, X₁₂81V, H101A, and N106S;
iii) in the VL region
a. L20I, X₁₁40K, X₂₄69S, and G102S;
b. L20I, X₂₄69S, and G102S;
c. L20I, V381, X₁₁40K, X₂₄69E, G102S and X₃₃93Y;
d. X₁₁40K and G102S;
e. L20I, X₁₁40K, X₂₄69S, G102S and X₃₃93Y;
f. L20M, X₁₁40K and X₂₄69E;
g. L20I, V381, X₁₁40K, X₂₄69E and G102S;
h. X₁₁40K, X₂₄69S and X₃₃93Y; or
i. X₁₁40K and X₂₄69S; and
iv) a combination of one amino acid substitution combination of i) and ii).

10. The polypeptide or polypeptide construct of claim 9, wherein said combination of amino acid substitution combinations of iii) is selected from:
a. X₇65A, X₁₂81V, V99A, H101A, N106S in the VH region, L20I, X₁₁40K, X₂₄69S, and G102S in the VL region;
b. D64E, X₇65A, X₁₂81V, H101N, X₁₄102E, F104I, N106S in the VH region, L20I, X₂₄69S, and G102S in the VL region:
c. L45M, X₇65A, H101A, N106T in the VH region, L20I, X₁₁40K, X₂₄69S, and G102S in the VL region;
d. L45M, X₇65A, H101A, N106S in the VH region, L20I, V381, X₁₁40K, X₂₄69E, G102S and X₃₃93Y in the VL region;
e. Q39E, X₇65A, H101N, N106T in the VH region, X₁₁40K and G102S in the VL region;
f. D64E, X₇65A, V99A, H101A, N106T in the VH region, X₁₁40K and G102S in the VL region;
g. X₇65A, X₁₂81V, V99A, H101A, X₁₄102E, F104I, N106T in the VH region, L20I, X₁₁40K, X₂₄69S, and G102S in the VL region;
h. X₇65A, X₁₂81V, H101N, X₁₄102E, F104I, N106S in the VH region, L20I, X₂₄69S, and G102S in the VL region;
i. D64E, X₇65A, X₁₂81V, H101A, N106S in the VH region, L20I, X₂₄69S, and G102S in the VL region;
j. D64E, X₇65A, H101A, N106T in the VH region, X₁₁40K and G102S in the VL region;
k. X₇65A, V99A, H101A, N106T in the VH region, X₁₁40K and G102S in the VL region;
l. D64E, X₇65A, H101A, N106S in the VH region, X₁₁40K and G102S in the VL region;
m. D64E, X₇65A, X₁₂81V, V99A, H101A, N106S in the VH region, L20I, X₁₁40K, X₂₄69S, G102S and X₃₃93Y in the VL region;
n. X₇65A, H101A, N106S in the VH region, X₁₁40K and G102S in the VL region;
o. N30S, Q39E, D64E, X₇65A, X₁₂81V, H101A, X₁₄102E, F104I, N106T in the VH region, L20M, X₁₁40K and X₂₄69E in the VL region;
p. L45M, D64E, X₇65A, H101A, N106T in the VH region, L20I, V381, X₁₁40K, X₂₄69E and G102S in the VL region;
q. N30S, L45M, X₇65A, X₁₂81V, H101A, N106T in the VH region, X₁₁40K and X₂₄69S in the VL region; and
r. N30S, L45M, D64E, X₇65A, X₁₂81V, H101A, N106S in the VH region, X₁₁40K and X₂₄69S in the VL region.

11. The polypeptide or polypeptide construct of claim 10, wherein in said combination of amino acid substitution combinations defined in:
a. and m. X₆ is I in said VH region sequence;
b. and r. X₃ is G in said VH region sequence;
c. X₁₂ is L in said VH region;
d. X₁₂ is L and X₁₇ is F in said VH region;
e. X₆ is I, X₁₄ is A and X₁₇ is F in said VH region sequence;
f. X₅ is I in said VH region sequence; and X₃₂ is A in said VL region sequence;
g. X₅ is I in said VH region sequence;
h. and i. X₃ is G in said VH region sequence;
j., l. and n. X₆ is I and X₁₇ is F in said VH region sequence; and X₃₂ is A in said VL region sequence;
k. X₆ is I said VH region sequence; and X₃₂ is A in said VL region sequence;
p. X₁₂ is L in said VH region; and
q. X₃ is G and X₁₇ is F in said VH region sequence.

12. The polypeptide or polypeptide construct of claim 5, or any one of claims 6 to 11, wherein said VH and VL region of i) and ii) is selected from the VH and VL region combinations as defined in SEQ ID NOs: 124 and 125, 172 and 173, 362 and 363, 552 and 553, 730 and 731, 928 and 929, 1106 and 1107, 1296 and 1297, 1474 and 1475, 1664 and 1665, and 1854 and 1855, wherein said one amino acid substitution or a combination thereof in said VH and/or VL region sequence results in a VH and/or a VL region sequence having the amino acid residue:
i. I at position 34, A at position 65, V at position 81, A at position 99, A at position 101, S at position 106 in the VH region sequence, I at position 20, K at position 40, S at position 69, and S at position 102 in the VL region sequence;
M at position 45, A at position 65, L at position 81, A at position 101, T at position 106 in the VH region sequence, I at position 20, K at position 40, S at position 69 and S at position 102 in the VL region sequence;
M at position 45, A at position 65, L at position 81, A at position 101, S at position 106, F at position 112 in the VH region sequence, I at position 20, 1 at position 38, K at position 40, E at position 69, S at position 102 and Y at position 93 in the VL region sequence;
I at position 34, E at position 39, A at position 65, N at position 101, A at position 102, T at position 106, F at position 112 in the VH region sequence, K at position 40 and S at position 102 in the VL region sequence;
I at position 34, E at position 64, A at position 65, A at position 99, A at position 101, T at position 106 in the VH region sequence, K at position 40, A at position 91 and S at position 102 in the VL region sequence;
I at position 34, A at position 65, V at position 81, A at position 99, A at position 101, E at position 102, I at position 104, T at position 106 in the VH region sequence, I at position 20, K at position 40, S at position 69 and S at position 102 in the VL region sequence;
E at position 64, A at position 65, G at position 68, V at position 81, A at position 101, S at position 106 in the VH region sequence, I at position 20, S at position 69 and S at position 102 in the VL region sequence;
I at position 34, E at position 64, A at position 65, A at position 101, T at position 106, F at position 112 in the VH region sequence, K at position 40, A at position 91 and S at position 102 in the VL region sequence;
I at position 34, E at position 64, A at position 65, A at position 101, S at position 106, F at position 112 in the VH region sequence, K at position 40, A at position 91 and S at position 102 in the VL region sequence;
I at position 34, E at position 64, A at position 65, V at position 81, A at position 99, A at position 101, S at position 106 in the VH region sequence, I at position 20, K at position 40, S at position 69, S at position 102 and Y at position 93 in the VL region sequence;
I at position 34, A at position 65, A at position 101, S at position 106, F at position 112 in the VH region sequence, K at position 40, A at position 91 and S at position 102 in the VL region sequence;
M at position 45, E at position 64, A at position 65, L at position 81, A at position 101, T at position 106 in the VH region sequence, I at position 20, 1 at position 38, K at position 40, E at position 69 and S at position 102 in the VL region sequence;
S at position 30, M at position 45, A at position 65, G at position 68, V at position 81, A at position 101, T at position 106, F at position 112 in the VH region sequence, K at position 40, S at position 69 and Y at position 93 in the VL region sequence; and
S at position 30, M at position 45, E at position 64, A at position 65, G at position 68, V at position 81, A at position 101, S at position 106 in the VH region sequence, K at position 40 and S at position 69 in the VL region sequence;
ii. E at position 64, A at position 65, G at position 68, V at position 81, N at position 101, E at position 102, I at position 104, T at position 106 in the VH region sequence, I at position 20, S at position 69 and S at position 102 in the VL region sequence;
A at position 65, G at position 68, V at position 81, N at position 101, E at position 102, I at position 104, S at position 106 in the VH region sequence, I at position 20, S at position 69 and S at position 102 in the VL region sequence;
I at position 34, A at position 65, A at position 99, A at position 101, T at position 106 in the VH region sequence, K at position 40, A at position 91 and S at position 102 in the VL region sequence; and
S at position 30, E at position 39, E at position 64, A at position 65, V at position 81, A at position 101, E at position 102, 1 at position 104, T at position 106 in the VH region sequence, M at position 20, K at position 40 and E at position 69 in the VL region sequence;
iii. A at position 101 in the VH region sequence;
iv. V at position 81, A at position 99_in the VH region sequence, I at position 20, K at position 40, S at position 69 and S at position 102 in the VL region sequence;
I at position 34,_V at position 81 in the VH region sequence, I at position 20,_K at position 40 and S at position 102 in the VL region sequence;
I at position 34 in the VH region sequence, I at position 20,_K at position 40_and S at position 102 in the VL region sequence;
I at position 34,_E at position 39,_V at position 81 in the VH region sequence, I at position 20,_K at position 40 and S at position 102 in the VL region sequence;
v. I at position 34,_V at position 81 in the VH region sequence, and K at position 40 in the VL region sequence;
M at position 45 in the VH region sequence, I at position 20,_K at position 40 and S at position 102 in the VH region sequence;
I at position 34,_A at position 65,_A at position 101 and S at position 106S in the VH region sequence;
I at position 20,_K at position 40,_S at position 69 and S at position 102 in the VL region sequence;
F at position 34_and V at position 81 in the VH region sequence;
M at position 45 in the VH region sequence, K at position 40 and S at position 102 in the VL region sequence;
D at position 39 in the VH region sequence, I at position 20,_K at position 40 and S at position 102 in the VL region sequence;
I at position 34_and V at position 81 in the VH region sequence;
E at position 39 in the VH region sequence, I at position 20,_K at position 40 and S at position 102 in the VL region sequence;
M at position 45 in the VH region sequence and K at position 40 in the VL region sequence;
I at position 34,_A at position 65,_V at position 81,_A at position 99,_A at position 101_and S at position 106 in the VH region sequence; or
vi. D at position 39 in the VH region sequence, I at position 20,_R at position 40 and S at position 102 in the VL region sequence;
I at position 34 in the VH region sequence;
K at position 40 in the VL region sequence;
D at position 39_in the VH region sequence, K at position 40 and S at position 102 in the VL region sequence;
I at position 20 and S at position 102 in the VH region sequence;
K at position 39 in the VH region sequence;
E at position 39 in the VH region sequence, K at position 40_and S at position 102 in the VL region sequence;
E at position 39 in the VH region sequence, I at position 20,_R at position 40_and S at position 102 in the VL region sequence;
D at position 39_in the VH region sequence, R at position 40_and S at position 102 in the VL region sequence;
V at position 81 in the VH region sequence;
D at position 39 in the VH region sequence and_K at position 40 in the VL region sequence;
F at position 112 in the VH region sequence;
F at position 112 in the VH region sequence and_I at position 38 in the VL region sequence;
E at position 39 in the VH region sequence and K at position 40 in the VL region sequence;
V at position 34 in the VH region sequence.

13. The polypeptide or polypeptide construct of any one of claims 1 to 12, wherein the VH and VL region sequence are linked by a linker.

14. The polypeptide or polypeptide construct of claim 13, wherein the linker is a peptide linker.

15. The polypeptide or polypeptide construct of claim 14, wherein said peptide linker comprises or consists of a G₄S linker, or G₄Q linker or repetitions thereof.

16. The polypeptide or polypeptide construct of any one of claims 1 to 15, wherein the polypeptide or polypeptide construct comprises at least one further binding domain.

17. The polypeptide or polypeptide construct of claim 16, wherein said at least one further binding domain binds to a cell surface antigen.

18. The polypeptide or polypeptide construct of claim 17, wherein said cell surface antigen is a tumor antigen.

19. The polypeptide or polypeptide construct of claim 18, wherein the tumor antigen is selected from the group consisting of BCMA, CD123, CD19, CD20, CD22, CD33, CD70, CDH19, CDH3, CLL1, CS1, CLDN6, CLDN18.2, DLL3, EGFRvII, FLT3, MAGEB2, MART1, MSLN, MUC17, PSMA, and STEAP1.

20. The polypeptide or polypeptide construct of any one of claims 1 to 19, wherein said polypeptide or polypeptide construct is a single chain polypeptide that is at least bispecific.

21. A polynucleotide encoding a polypeptide or polypeptide construct as defined in any one of claims 1 to 20.

22. A vector comprising a polynucleotide as defined in claim 21.

23. A host cell transformed or transfected with the polynucleotide as defined in claim 21 or with the vector as defined in claim 22.

24. A process for the production of an polypeptide or polypeptide construct according to any one of claims 1 to 20, said process comprising culturing a host cell as defined in claim 23 under conditions allowing the expression of the polypeptide or polypeptide construct as defined in any one of claims 1 to 20 and recovering the produced polypeptide or polypeptide construct from the culture.

25. A pharmaceutical composition comprising a polypeptide or polypeptide construct according to any one of claims 1 to 20, or produced according to the process of claim 24.

26. The polypeptide or polypeptide construct of any one of claims 18 to 20, or produced according to the process of claim 24, for use in the prevention, treatment or amelioration of a disease selected from a tumorous disease.

27. A method for the prevention, treatment or amelioration of a tumorous disease, comprising administering to a subject in need thereof the polypeptide or polypeptide construct according to any one of claims 18 to 20, or produced according to the process of claim 24.

28. A kit comprising a polypeptide or polypeptide construct according to any one of claims 1 to 20, or produced according to the process of claim 24, a polynucleotide as defined in claim 21, a vector as defined in claim 22, and/or a host cell as defined in claim 23.

The application's sequence listing, which the Patent Office published only in electronic form, follows.

SEQUENCE LISTING (2561 sequences)

SEQ ID NO: 1 - protein, 50 aa, Artificial Sequence
  Synthetic
GGGGSGGGGSGGGGSGGGGSGGGGSGGGGSGGGGSGGGGSGGGGSGGGGS

SEQ ID NO: 2 - protein, 15 aa, Artificial Sequence
  Synthetic
GGGGSGGGGSGGGGS

SEQ ID NO: 3 - protein, 51 aa, Artificial Sequence
  Synthetic
GEAAAKEAAAKEAAAKEAAAKEAAAKEAAAKEAAAKEAAAKEAAAKEAAAK

SEQ ID NO: 4 - protein, 4 aa, Artificial Sequence
  Synthetic
GGGG

SEQ ID NO: 5 - protein, 5 aa, Artificial Sequence
  Synthetic
GGGGQ

SEQ ID NO: 6 - protein, 5 aa, Artificial Sequence
  Synthetic
GGGGS

SEQ ID NO: 7 - protein, 51 aa, Artificial Sequence
  Synthetic
SGGGGSGGGGSGGGGSGGGGSGGGGSGGGGSGGGGSGGGGSGGGGSGGGGS

SEQ ID NO: 8 - protein, 16 aa, Artificial Sequence
  Synthetic
SGGGGSGGGGSGGGGS

SEQ ID NO: 9 - protein, 52 aa, Artificial Sequence
  Synthetic
SGEAAAKEAAAKEAAAKEAAAKEAAAKEAAAKEAAAKEAAAKEAAAKEAAAK

SEQ ID NO: 10 - protein, 6 aa, Artificial Sequence
  Synthetic
SGGGGQ

SEQ ID NO: 11 - protein, 6 aa, Artificial Sequence
  Synthetic
SGGGGS

SEQ ID NO: 12 - protein, 50 aa, Artificial Sequence
  Synthetic
EAAAKEAAAKEAAAKEAAAKEAAAKEAAAKEAAAKEAAAKEAAAKEAAAK

SEQ ID NO: 13 - protein, 50 aa, Artificial Sequence; identical to SEQ ID NO: 1
  Synthetic

SEQ ID NO: 14 - protein, 968 aa, Artificial Sequence
  Synthetic
DKTHTCPPCPAPELLGGPSVFLFPPKPKDTLMISRTPEVTCVVVDVSHEDPEVKFNWYVDGVEVHNAKTKPCEEQYGSTYRCVSVLTVLHQDWLNGKEYKCKVSNKALPAPIEKTISKAKGQPREPQVYTLPPSREEMTKNQVSLTCLVKGFYPSDIAVEWESNGQPENNYKTTPPVLDSDGSFFLYSKLTVDKSRWQQGNVFSCSVMHEALHNHYTQKSLSLSPGKGGGGSGGGGSGGGGSGGGGSGGGGSGGGGSDKTHTCPPCPAPELLGGPSVFLFPPKPKDTLMISRTPEVTCVVVDVSHEDPEVKFNWYVDGVEVHNAKTKPCEEQYGSTYRCVSVLTVLHQDWLNGKEYKCKVSNKALPAPIEKTISKAKGQPREPQVYTLPPSREEMTKNQVSLTCLVKGFYPSDIAVEWESNGQPENNYKTTPPVLDSDGSFFLYSKLTVDKSRWQQGNVFSCSVMHEALHNHYTQKSLSLSPGKDKTHTCPPCPAPELLGGPSVFLFPPKPKDTLMISRTPEVTCVVVDVSHEDPEVKFNWYVDGVEVHNAKTKPCEEQYGSTYRCVSVLTVLHQDWLNGKEYKCKVSNKALPAPIEKTISKAKGQPREPQVYTLPPSREEMTKNQVSLTCLVKGFYPSDIAVEWESNGQPENNYKTTPPVLDSDGSFFLYSKLTVDKSRWQQGNVFSCSVMHEALHNHYTQKSLSLSPGKGGGGSGGGGSGGGGSGGGGSGGGGSGGGGSDKTHTCPPCPAPELLGGPSVFLFPPKPKDTLMISRTPEVTCVVVDVSHEDPEVKFNWYVDGVEVHNAKTKPCEEQYGSTYRCVSVLTVLHQDWLNGKEYKCKVSNKALPAPIEKTISKAKGQPREPQVYTLPPSREEMTKNQVSLTCLVKGFYPSDIAVEWESNGQPENNYKTTPPVLDSDGSFFLYSKLTVDKSRWQQGNVFSCSVMHEALHNHYTQKSLSLSPGK

SEQ ID NO: 15 - protein, 5 aa, Artificial Sequence
  Synthetic
GGGGS

SEQ ID NO: 16 - protein, 585 aa, Artificial Sequence [sequence omitted]

SEQ ID NO: 17 - protein, 143 aa, Artificial Sequence
  Synthetic
LDSPDRPWNPPTFSPALLVVTEGDNATFTCSFSNTSESFVLNWYRMSPSNQTDKLAAFPEDRSQPGQDCRFRVTQLPNGRDFHMSVVRARRNDSGTYLCGAISLAPKAQIKESLRAELRVTERRAEVPTAHPSPSPRPAGQFQ

SEQ ID NO: 18 - protein, 484 aa, Artificial Sequence
  Synthetic
DKTHTCPPCPAPELLGGPSVFLFPPKPKDTLMISRTPEVTCVVVDVSHEDPEVKFNWYVDGVEVHNAKTKPCEEQYGSTYRCVSVLTVLHQDWLNGKEYKCKVSNKALPAPIEKTISKAKGQPREPQVYTLPPSREEMTKNQVSLTCLVKGFYPSDIAVEWESNGQPENNYKTTPPVLDSDGSFFLYSKLTVDKSRWQQGNVFSCSVMHEALHNHYTQKSLSLSPGKGGGGSGGGGSGGGGSGGGGSGGGGSGGGGSDKTHTCPPCPAPELLGGPSVFLFPPKPKDTLMISRTPEVTCVVVDVSHEDPEVKFNWYVDGVEVHNAKTKPCEEQYGSTYRCVSVLTVLHQDWLNGKEYKCKVSNKALPAPIEKTISKAKGQPREPQVYTLPPSREEMTKNQVSLTCLVKGFYPSDIAVEWESNGQPENNYKTTPPVLDSDGSFFLYSKLTVDKSRWQQGNVFSCSVMHEALHNHYTQKSLSLSPGK

SEQ ID NO: 19 - protein, 474 aa, Artificial Sequence
  Synthetic
CPPCPAPELLGGPSVFLFPPKPKDTLMISRTPEVTCVVVDVSHEEPEVKFNWYVDGVEVHNAKTKPCEEQYGSTYRCVSVLTVLHQDWLNGKEYKCKVSNKALPAPIEKTISKAKGQPREPQVYTLPPSREEMTKNQVSLTCLVKGFYPSDIAVEWESNGQPENNYKTTPPVLDSDGSFFLYSKLTVDKSRWQQGNVFSCSVMHEALHNHYTQKSLSLSPGKGGGGQGGGGQGGGGQGGGGQGGGGQGGGGQCPPCPAPELLGGPSVFLFPPKPKDTLMISRTPEVTCVVVDVSHEEPEVKFNWYVDGVEVHNAKTKPCEEQYGSTYRCVSVLTVLHQDWLNGKEYKCKVSNKALPAPIEKTISKAKGQPREPQVYTLPPSREEMTKNQVSLTCLVKGFYPSDIAVEWESNGQPENNYKTTPPVLDSDGSFFLYSKLTVDKSRWQQGNVFSCSVMHEALHNHYTQKSLSLSPGK

SEQ ID NO: 20 - protein, 5 aa, Artificial Sequence
  Synthetic
KYAIN

SEQ ID NO: 21 - protein, 19 aa, Artificial Sequence
  Synthetic
RIRSKYNNYATYYADAVKD

SEQ ID NO: 22 - protein, 14 aa, Artificial Sequence
  Synthetic
AGNFGTSYISYWAY

SEQ ID NO: 23 - protein, 14 aa, Artificial Sequence
  Synthetic
GSSTGAVTSGNYPN

SEQ ID NO: 24 - protein, 7 aa, Artificial Sequence
  Synthetic
GTKFLAP

SEQ ID NO: 25 - protein, 9 aa, Artificial Sequence
  Synthetic
ALWYSNRWV

SEQ ID NO: 26 - protein, 125 aa, Artificial Sequence
  Synthetic
EVQLVESGGGLVQPGGSLKLSCAASGFTFNKYAINWVRQAPGKGLEWVARIRSKYNNYATYYADAVKDRFTISRDDSKNTAYLQMNNLKTEDTAVYYCARAGNFGTSYISYWAYWGQGTLVTVSS

SEQ ID NO: 27 - protein, 109 aa, Artificial Sequence
  Synthetic
QTVVTQEPSLTVSPGGTVTLTCGSSTGAVTSGNYPNWVQKKPGQAPRGLIGGTKFLAPGTPARFSGSLLGGKAALTLSGVQPEDEAEYYCALWYSNRWVFGSGTKLTVL

SEQ ID NO: 28 - protein, 5 aa, Artificial Sequence
  Synthetic
KYAIN

SEQ ID NO: 29 - protein, 19 aa, Artificial Sequence
  Synthetic
RIRSKYNNYATYYAEAVKD

SEQ ID NO: 30 - protein, 14 aa, Artificial Sequence
  Synthetic
AGNFGTSYISYWAY

SEQ ID NO: 31 - protein, 14 aa, Artificial Sequence
  Synthetic
GSSTGAVTSGNYPN

SEQ ID NO: 32 - protein, 7 aa, Artificial Sequence
  Synthetic
GTKFLAP

SEQ ID NO: 33 - protein, 9 aa, Artificial Sequence
  Synthetic
ALWYSNRWV

SEQ ID NO: 34 - protein, 125 aa, Artificial Sequence
  Synthetic
EVQLVESGGGLVQPGGSLKLSCAASGFTFNKYAINWVRQAPGKGLEWVARIRSKYNNYATYYAEAVKDRFTISRDDSKNTAYLQMNNLKTEDTAVYYCARAGNFGTSYISYWAYWGQGTLVTVSS

SEQ ID NO: 35 - protein, 109 aa, Artificial Sequence; identical to SEQ ID NO: 27
  Synthetic

SEQ ID NO: 36 - protein, 5 aa, Artificial Sequence
  Synthetic
KYAIN

SEQ ID NO: 37 - protein, 19 aa, Artificial Sequence
  Synthetic
RIRSKYNNYATYYADAVKD

SEQ ID NO: 38 - protein, 14 aa, Artificial Sequence
  Synthetic
AGNFGSSYISYFAY

SEQ ID NO: 39 - protein, 14 aa, Artificial Sequence
  Synthetic
GSSTGAVTSGNYPN

SEQ ID NO: 40 - protein, 7 aa, Artificial Sequence
  Synthetic
GTKFLAP

SEQ ID NO: 41 - protein, 9 aa, Artificial Sequence
  Synthetic
ALWYSNRWV

SEQ ID NO: 42 - protein, 125 aa, Artificial Sequence
  Synthetic
EVQLVESGGGLVQPGGSLKLSCAASGFTFNKYAINWVRQAPGKGLEWVARIRSKYNNYATYYADAVKDRFTISRDDSKNTAYLQMNNLKTEDTAVYYCVRAGNFGSSYISYFAYWGQGTLVTVSS

SEQ ID NO: 43 - protein, 109 aa, Artificial Sequence; identical to SEQ ID NO: 27
  Synthetic

SEQ ID NO: 44 - protein, 5 aa, Artificial Sequence
  Synthetic
KYAIN

SEQ ID NO: 45 - protein, 19 aa, Artificial Sequence
  Synthetic
RIRSKYNNYATYYAEAVKD

SEQ ID NO: 46 - protein, 14 aa, Artificial Sequence
  Synthetic
AGNFGSSYISYFAY

SEQ ID NO: 47 - protein, 14 aa, Artificial Sequence
  Synthetic
GSSTGAVTSGNYPN

SEQ ID NO: 48 - protein, 7 aa, Artificial Sequence
  Synthetic
GTKFLAP

SEQ ID NO: 49 - protein, 9 aa, Artificial Sequence
  Synthetic
ALWYSNRWV

SEQ ID NO: 50 - protein, 125 aa, Artificial Sequence
  Synthetic
EVQLVESGGGLVQPGGSLKLSCAASGFTFNKYAINWVRQAPGKGLEWVARIRSKYNNYATYYAEAVKDRFTISRDDSKNTAYLQMNNLKTEDTAVYYCVRAGNFGSSYISYFAYWGQGTLVTVSS

SEQ ID NO: 51 - protein, 109 aa, Artificial Sequence; identical to SEQ ID NO: 27
  Synthetic

SEQ ID NO: 52 - protein, 5 aa, Artificial Sequence
  Synthetic
KYAIN

SEQ ID NO: 53 - protein, 19 aa, Artificial Sequence
  Synthetic
RIRSKYNNYATYYAEAVKD

SEQ ID NO: 54 - protein, 14 aa, Artificial Sequence
  Synthetic
AGNFGTSYISYFAY

SEQ ID NO: 55 - protein, 14 aa, Artificial Sequence
  Synthetic
GSSTGAVTSGNYPN

SEQ ID NO: 56 - protein, 7 aa, Artificial Sequence
  Synthetic
GTKFLAP

SEQ ID NO: 57 - protein, 9 aa, Artificial Sequence
  Synthetic
ALWYSNRWV

SEQ ID NO: 58 - protein, 125 aa, Artificial Sequence
  Synthetic
EVQLVESGGGLVQPGGSLKLSCAASGFTFNKYAINWVRQAPGKGLEWVARIRSKYNNYATYYAEAVKDRFTISRDDSKNTAYLQMNNLKTEDTAVYYCVRAGNFGTSYISYFAYWGQGTLVTVSS

SEQ ID NO: 59 - protein, 109 aa, Artificial Sequence; identical to SEQ ID NO: 27
  Synthetic

SEQ ID NO: 60 - protein, 5 aa, Artificial Sequence
  Synthetic
KYAMN

SEQ ID NO: 61 - protein, 19 aa, Artificial Sequence
  Synthetic
RIRSKYNNYATYYAEAVKD

SEQ ID NO: 62 - protein, 14 aa, Artificial Sequence
  Synthetic
AENIGTSYISYWAY

SEQ ID NO: 63 - protein, 14 aa, Artificial Sequence
  Synthetic
GSSTGAVTSGNYPN

SEQ ID NO: 64 - protein, 7 aa, Artificial Sequence
  Synthetic
GTKFLAP

SEQ ID NO: 65 - protein, 9 aa, Artificial Sequence
  Synthetic
VLWYSNRWV

SEQ ID NO: 66 - protein, 125 aa, Artificial Sequence
  Synthetic
EVQLVESGGGLVQPGGSLKLSCAASGFTFSKYAMNWVREAPGKGLEWVARIRSKYNNYATYYAEAVKDRFTISRDDSKNTVYLQMNNLKTEDTAVYYCVRAENIGTSYISYWAYWGQGTLVTVSS

SEQ ID NO: 67 - protein, 109 aa, Artificial Sequence
  Synthetic
QTVVTQEPSLTVSPGGTVTMTCGSSTGAVTSGNYPNWVQKKPGQAPRGLIGGTKFLAPGTPARFSGSLEGGKAALTLSGVQPEDEAEYYCVLWYSNRWVFGGGTKLTVL

SEQ ID NO: 68 - protein, 5 aa, Artificial Sequence
  Synthetic
KYAMN

SEQ ID NO: 69 - protein, 19 aa, Artificial Sequence
  Synthetic
RIRSKYNNYATYYAEAVKG

SEQ ID NO: 70 - protein, 14 aa, Artificial Sequence
  Synthetic
AGNFGSSYISYWAY

SEQ ID NO: 71 - protein, 14 aa, Artificial Sequence
  Synthetic
GSSTGAVTSGNYPN

SEQ ID NO: 72 - protein, 7 aa, Artificial Sequence
  Synthetic
GTKFLAP

SEQ ID NO: 73 - protein, 9 aa, Artificial Sequence
  Synthetic
VLWYSNRWV

SEQ ID NO: 74 - protein, 125 aa, Artificial Sequence
  Synthetic
EVQLVESGGGLVQPGGSLKLSCAASGFTFSKYAMNWVRQAPGKGMEWVARIRSKYNNYATYYAEAVKGRFTISRDDSKNTVYLQMNNLKTEDTAVYYCVRAGNFGSSYISYWAYWGQGTLVTVSS

SEQ ID NO: 75 - protein, 109 aa, Artificial Sequence
  Synthetic
QTVVTQEPSLTVSPGGTVTLTCGSSTGAVTSGNYPNWVQKKPGQAPRGLIGGTKFLAPGTPARFSGSLSGGKAALTLSGVQPEDEAEYYCVLWYSNRWVFGGGTKLTVL

SEQ ID NO: 76 - protein, 5 aa, Artificial Sequence
  Synthetic
KYAMN

SEQ ID NO: 77 - protein, 19 aa, Artificial Sequence
  Synthetic
RIRSKYNNYATYYADAVKG

SEQ ID NO: 78 - protein, 14 aa, Artificial Sequence
  Synthetic
AGNFGTSYISYFAY

SEQ ID NO: 79 - protein, 14 aa, Artificial Sequence
  Synthetic
GSSTGAVTSGNYPN

SEQ ID NO: 80 - protein, 7 aa, Artificial Sequence
  Synthetic
GTKFLAP

SEQ ID NO: 81 - protein, 9 aa, Artificial Sequence
  Synthetic
VLYYSNRWV

SEQ ID NO: 82 - protein, 125 aa, Artificial Sequence
  Synthetic
EVQLVESGGGLVQPGGSLKLSCAASGFTFSKYAMNWVRQAPGKGMEWVARIRSKYNNYATYYADAVKGRFTISRDDSKNTVYLQMNNLKTEDTAVYYCVRAGNFGTSYISYFAYWGQGTLVTVSS

SEQ ID NO: 83 - protein, 109 aa, Artificial Sequence
  Synthetic
QTVVTQEPSLTVSPGGTVTLTCGSSTGAVTSGNYPNWVQKKPGQAPRGLIGGTKFLAPGTPARFSGSLSGGKAALTLSGVQPEDEAEYYCVLYYSNRWVFGGGTKLTVL

SEQ ID NO: 84 - protein, 5 aa, Artificial Sequence
  Synthetic
KYAIN

SEQ ID NO: 85 - protein, 19 aa, Artificial Sequence
  Synthetic
RIRSKYNNYATYYADAVKD

SEQ ID NO: 86 - protein, 14 aa, Artificial Sequence
  Synthetic
AENIGTSYISYWAY

SEQ ID NO: 87 - protein, 14 aa, Artificial Sequence
  Synthetic
GSSTGAVTSGNYPN

SEQ ID NO: 88 - protein, 7 aa, Artificial Sequence
  Synthetic
GTKFLAP

SEQ ID NO: 89 - protein, 9 aa, Artificial Sequence
  Synthetic
VLWYSNRWV

SEQ ID NO: 90 - protein, 125 aa, Artificial Sequence
  Synthetic
EVQLVESGGGLVQPGGSLKLSCAASGFTFNKYAINWVRQAPGKGLEWVARIRSKYNNYATYYADAVKDRFTISRDDSKNTVYLQMNNLKTEDTAVYYCARAENIGTSYISYWAYWGQGTLVTVSS

SEQ ID NO: 91 - protein, 109 aa, Artificial Sequence
  Synthetic
QTVVTQEPSLTVSPGGTVTITCGSSTGAVTSGNYPNWVQKKPGQAPRGLIGGTKFLAPGTPARFSGSLSGGKAALTLSGVQPEDEAEYYCVLWYSNRWVFGSGTKLTVL

SEQ ID NO: 92 - protein, 5 aa, Artificial Sequence
  Synthetic
KYAIN

SEQ ID NO: 93 - protein, 19 aa, Artificial Sequence
  Synthetic
RIRSKYNNYATYYAEAVKD

SEQ ID NO: 94 - protein, 14 aa, Artificial Sequence
  Synthetic
AGNFGSSYISYWAY

SEQ ID NO: 95 - protein, 14 aa, Artificial Sequence
  Synthetic
GSSTGAVTSGNYPN

SEQ ID NO: 96 - protein, 7 aa, Artificial Sequence
  Synthetic
GTKFLAP

SEQ ID NO: 97 - protein, 9 aa, Artificial Sequence
  Synthetic
VLYYSNRWV

SEQ ID NO: 98 - protein, 125 aa, Artificial Sequence
  Synthetic
EVQLVESGGGLVQPGGSLKLSCAASGFTFNKYAINWVRQAPGKGLEWVARIRSKYNNYATYYAEAVKDRFTISRDDSKNTVYLQMNNLKTEDTAVYYCARAGNFGSSYISYWAYWGQGTLVTVSS

SEQ ID NO: 99 - protein, 109 aa, Artificial Sequence
  Synthetic
QTVVTQEPSLTVSPGGTVTITCGSSTGAVTSGNYPNWVQKKPGQAPRGLIGGTKFLAPGTPARFSGSLSGGKAALTLSGVQPEDEAEYYCVLYYSNRWVFGSGTKLTVL

SEQ ID NO: 100 - protein, 125 aa, Artificial Sequence
  Synthetic
EVQLVESGGGLVQPGGSLKLSCAASGFTFNKYAMNWVRQAPGKGLEWVARIRSKYNNYATYYAEAVKGRFTISRDDSKNTVYLQMNNLKTEDTAVYYCVRAGNFGSSYISYWAYWGQGTLVTVSS

SEQ ID NO: 101 - protein, 109 aa, Artificial Sequence
  Synthetic
QTVVTQEPSLTVSPGGTVTITCGSSTGAVTSGNYPNWVQQKPGQAPRGLIGGTKFLAPGTPARFSGSLSGGKAALTLSGVQPEDEAEYYCVLWYSNRWVFGSGTKLTVL

SEQ ID NO: 102 - protein, 5 aa, Artificial Sequence
  Synthetic
KYAMN

SEQ ID NO: 103 - protein, 19 aa, Artificial Sequence
  Synthetic
RIRSKYNNYATYYADAVKG

SEQ ID NO: 104 - protein, 14 aa, Artificial Sequence
  Synthetic
NENIGSSYISYWAY

SEQ ID NO: 105 - protein, 14 aa, Artificial Sequence
  Synthetic
GSSTGAVTSGNYPN

SEQ ID NO: 106 - protein, 7 aa, Artificial Sequence
  Synthetic
GTKFLAP

SEQ ID NO: 107 - protein, 9 aa, Artificial Sequence
  Synthetic
VLWYSNRWV

SEQ ID NO: 108 - protein, 125 aa, Artificial Sequence
  Synthetic
EVQLVESGGGLVQPGGSLKLSCAASGFTFNKYAMNWVRQAPGKGLEWVARIRSKYNNYATYYADAVKGRFTISRDDSKNTVYLQMNNLKTEDTAVYYCVRNENIGSSYISYWAYWGQGTLVTVSS

SEQ ID NO: 109 - protein, 109 aa, Artificial Sequence; identical to SEQ ID NO: 101
  Synthetic

SEQ ID NO: 110 - protein, 5 aa, Artificial Sequence
  Synthetic
KYAMN

SEQ ID NO: 111 - protein, 19 aa, Artificial Sequence
  Synthetic
RIRSKYNNYATYYAEAVKD

SEQ ID NO: 112 - protein, 14 aa, Artificial Sequence
  Synthetic
AGNFGTSYISYWAY

SEQ ID NO: 113 - protein, 14 aa, Artificial Sequence
  Synthetic
GSSTGAVTSGNYPN

SEQ ID NO: 114 - protein, 7 aa, Artificial Sequence
  Synthetic
GTKFLAP

SEQ ID NO: 115 - protein, 9 aa, Artificial Sequence
  Synthetic
VLWYSNRWV

SEQ ID NO: 116 - protein, 125 aa, Artificial Sequence
  Synthetic
EVQLVESGGGLVQPGGSLKLSCAASGFTFNKYAMNWVRQAPGKGMEWVARIRSKYNNYATYYAEAVKDRFTISRDDSKNTLYLQMNNLKTEDTAVYYCVRAGNFGTSYISYWAYWGQGTLVTVSS

SEQ ID NO: 117 - protein, 109 aa, Artificial Sequence
  Synthetic
QTVVTQEPSLTVSPGGTVTITCGSSTGAVTSGNYPNWIQKKPGQAPRGLIGGTKFLAPGTPARFSGSLEGGKAALTLSGVQPEDEAEYYCVLWYSNRWVFGSGTKLTVL

SEQ ID NO: 118 - protein, 5 aa, Artificial Sequence
  Synthetic
KYAIN

SEQ ID NO: 119 - protein, 19 aa, Artificial Sequence
  Synthetic
RIRSKYNNYATYYADQVKD

SEQ ID NO: 120 - protein, 14 aa, Artificial Sequence
  Synthetic
HANFGNSYISYWAY

SEQ ID NO: 121 - protein, 14 aa, Artificial Sequence
  Synthetic
ASSTGAVTSGNYPN

SEQ ID NO: 122 - protein, 7 aa, Artificial Sequence
  Synthetic
GTKFLVP

SEQ ID NO: 123 - protein, 9 aa, Artificial Sequence
  Synthetic
TLWYSNRWV

SEQ ID NO: 124 - protein, 125 aa, Artificial Sequence
  Synthetic
EVQLVESGGGLVQPGGSLKLSCAASGFTFNKYAINWVRQAPGKGLEWVARIRSKYNNYATYYADQVKDRFTISRDDSKNTAYLQMNNLKTEDTAVYYCVRHANFGNSYISYWAYWGQGTLVTVSS

SEQ ID NO: 125 - protein, 109 aa, Artificial Sequence
  Synthetic
QTVVTQEPSLTVSPGGTVTLTCASSTGAVTSGNYPNWVQQKPGQAPRGLIGGTKFLVPGTPARFSGSLLGGKAALTLSGVQPEDEAEYYCTLWYSNRWVFGGGTKLTVL

SEQ ID NO: 126 - protein, 5 aa, Artificial Sequence
  Synthetic
KYAIN

SEQ ID NO: 127 - protein, 19 aa, Artificial Sequence
  Synthetic
RIRSKYNNYATYYADAVKD

SEQ ID NO: 128 - protein, 14 aa, Artificial Sequence
  Synthetic
AANFGSSYISYWAY

SEQ ID NO: 129 - protein, 14 aa, Artificial Sequence
  Synthetic
ASSTGAVTSGNYPN

SEQ ID NO: 130 - protein, 7 aa, Artificial Sequence
  Synthetic
GTKFLVP

SEQ ID NO: 131 - protein, 9 aa, Artificial Sequence
  Synthetic
TLWYSNRWV

SEQ ID NO: 132 - protein, 125 aa, Artificial Sequence
  Synthetic
EVQLVESGGGLVQPGGSLKLSCAASGFTFNKYAINWVRQAPGKGLEWVARIRSKYNNYATYYADAVKDRFTISRDDSKNTVYLQMNNLKTEDTAVYYCARAANFGSSYISYWAYWGQGTLVTVSS

SEQ ID NO: 133 - protein, 109 aa, Artificial Sequence
  Synthetic
QTVVTQEPSLTVSPGGTVTITCASSTGAVTSGNYPNWVQKKPGQAPRGLIGGTKFLVPGTPARFSGSLSGGKAALTLSGVQPEDEAEYYCTLWYSNRWVFGSGTKLTVL

SEQ ID NO: 134 - protein, 5 aa, Artificial Sequence
  Synthetic
KYAMN

SEQ ID NO: 135 - protein, 19 aa, Artificial Sequence
  Synthetic
RIRSKYNNYATYYAEAVKG

SEQ ID NO: 136 - protein, 14 aa, Artificial Sequence
  Synthetic
NENIGTSYISYWAY

SEQ ID NO: 137 - protein, 14 aa, Artificial Sequence
  Synthetic
ASSTGAVTSGNYPN

SEQ ID NO: 138 - protein, 7 aa, Artificial Sequence
  Synthetic
GTKFLVP

SEQ ID NO: 139 - protein, 9 aa, Artificial Sequence
  Synthetic
TLWYSNRWV

SEQ ID NO: 140 - protein, 125 aa, Artificial Sequence
  Synthetic
EVQLVESGGGLVQPGGSLKLSCAASGFTFNKYAMNWVRQAPGKGLEWVARIRSKYNNYATYYAEAVKGRFTISRDDSKNTVYLQMNNLKTEDTAVYYCVRNENIGTSYISYWAYWGQGTLVTVSS

SEQ ID NO: 141 - protein, 109 aa, Artificial Sequence
  Synthetic
QTVVTQEPSLTVSPGGTVTITCASSTGAVTSGNYPNWVQQKPGQAPRGLIGGTKFLVPGTPARFSGSLSGGKAALTLSGVQPEDEAEYYCTLWYSNRWVFGSGTKLTVL

SEQ ID NO: 142 - protein, 5 aa, Artificial Sequence
  Synthetic
KYAIN

SEQ ID NO: 143 - protein, 19 aa, Artificial Sequence
  Synthetic
RIRSKYNNYATYYADAVKD

SEQ ID NO: 144 - protein, 14 aa, Artificial Sequence
  Synthetic
AANFGSSYISYFAY

SEQ ID NO: 145 - protein, 14 aa, Artificial Sequence
  Synthetic
ASSTGAVTSGNYPN

SEQ ID NO: 146 - protein, 7 aa, Artificial Sequence
  Synthetic
GTKFLVP

SEQ ID NO: 147 - protein, 9 aa, Artificial Sequence
  Synthetic
TLYYSNRWV

SEQ ID NO: 148 - protein, 125 aa, Artificial Sequence
  Synthetic
EVQLVESGGGLVQPGGSLKLSCAASGFTFNKYAINWVRQAPGKGMEWVARIRSKYNNYATYYADAVKDRFTISRDDSKNTLYLQMNNLKTEDTAVYYCVRAANFGSSYISYFAYWGQGTLVTVSS

SEQ ID NO: 149 - protein, 109 aa, Artificial Sequence
  Synthetic
QTVVTQEPSLTVSPGGTVTITCASSTGAVTSGNYPNWIQKKPGQAPRGLIGGTKFLVPGTPARFSGSLEGGKAALTLSGVQPEDEAEYYCTLYYSNRWVFGSGTKLTVL

SEQ ID NO: 150 - protein, 5 aa, Artificial Sequence
  Synthetic
KYAIN

SEQ ID NO: 151 - protein, 19 aa, Artificial Sequence
  Synthetic
RIRSKYNNYATYYADAVKD

SEQ ID NO: 152 - protein, 14 aa, Artificial Sequence
  Synthetic
AANFGTSYISYWAY

SEQ ID NO: 153 - protein, 14 aa, Artificial Sequence
  Synthetic
ASSTGAVTSGNYPN

SEQ ID NO: 154 - protein, 7 aa, Artificial Sequence
  Synthetic
GTKFLVP

SEQ ID NO: 155 - protein, 9 aa, Artificial Sequence
  Synthetic
TLWYSNRWV

SEQ ID NO: 156 - protein, 125 aa, Artificial Sequence
  Synthetic
EVQLVESGGGLVQPGGSLKLSCAASGFTFNKYAINWVRQAPGKGMEWVARIRSKYNNYATYYADAVKDRFTISRDDSKNTLYLQMNNLKTEDTAVYYCVRAANFGTSYISYWAYWGQGTLVTVSS

SEQ ID NO: 157 - protein, 109 aa, Artificial Sequence; identical to SEQ ID NO: 133
  Synthetic

SEQ ID NO: 158 - protein, 5 aa, Artificial Sequence
  Synthetic
KYAIN

SEQ ID NO: 159 - protein, 19 aa, Artificial Sequence
  Synthetic
RIRSKYNNYATYYADAVKD

SEQ ID NO: 160 - protein, 14 aa, Artificial Sequence
  Synthetic
NANFGTSYISYFAY

SEQ ID NO: 161 - protein, 14 aa, Artificial Sequence
  Synthetic
ASSTGAVTSGNYPN

SEQ ID NO: 162 - protein, 7 aa, Artificial Sequence
  Synthetic
GTKFLVP

SEQ ID NO: 163 - protein, 9 aa, Artificial Sequence
  Synthetic
TLWYSNRWV

SEQ ID NO: 164 - protein, 125 aa, Artificial Sequence
  Synthetic
EVQLVESGGGLVQPGGSLKLSCAASGFTFNKYAINWVREAPGKGLEWVARIRSKYNNYATYYADAVKDRFTISRDDSKNTAYLQMNNLKTEDTAVYYCVRNANFGTSYISYFAYWGQGTLVTVSS

SEQ ID NO: 165 - protein, 109 aa, Artificial Sequence
  Synthetic
QTVVTQEPSLTVSPGGTVTLTCASSTGAVTSGNYPNWVQKKPGQAPRGLIGGTKFLVPGTPARFSGSLLGGKAALTLSGVQPEDEAEYYCTLWYSNRWVFGSGTKLTVL

SEQ ID NO: 166 - protein, 5 aa, Artificial Sequence
  Synthetic
VYAMN

SEQ ID NO: 167 - protein, 19 aa, Artificial Sequence
  Synthetic
RIRSKYNNYATYYADSVKK

SEQ ID NO: 168 - protein, 14 aa, Artificial Sequence
  Synthetic
HGNFGNSYLSWWAY

SEQ ID NO: 169 - protein, 14 aa, Artificial Sequence
  Synthetic
RSSTGAVTSGYYPN

SEQ ID NO: 170 - protein, 7 aa, Artificial Sequence
  Synthetic
ATDMRPS

SEQ ID NO: 171 - protein, 9 aa, Artificial Sequence
  Synthetic
ALWYSNRWV

SEQ ID NO: 172 - protein, 125 aa, Artificial Sequence
  Synthetic
EVQLVESGGGLVQPGGSLKLSCAASGFTFNVYAMNWVRQAPGKGLEWVARIRSKYNNYATYYADSVKKRFTISRDDSKNTAYLQMNNLKTEDTAVYYCVRHGNFGNSYLSWWAYWGQGTLVTVSS

SEQ ID NO: 173 - protein, 109 aa, Artificial Sequence
  Synthetic
QTVVTQEPSLTVSPGGTVTLTCRSSTGAVTSGYYPNWVQQKPGQAPRGLIGATDMRPSGTPARFSGSLLGGKAALTLSGVQPEDEAEYYCALWYSNRWVFGGGTKLTVL

SEQ ID NO: 174 - protein, 125 aa, Artificial Sequence
  Synthetic
EVQLVESGGGLVQPGGSLKLSCAASGFTFNVYAMNWVRQAPGKGLEWVARIRSKYNNYATYYADSVKKRFTISRDDSKNTIYLQMNNLKTEDTAVYYCVRHGNFGNSYLSWWAYWGQGTLVTVSS

SEQ ID NO: 175 - protein, 109 aa, Artificial Sequence; identical to SEQ ID NO: 173
  Synthetic

SEQ ID NO: 176 - protein, 125 aa, Artificial Sequence
  Synthetic
EVQLVESGGGLVQPGGSLKLSCAASGFTFNVYAMNWVRQAPGKGLEWVARIRSKYNNYATYYADSVKKRFTISRDDSKNTLYLQMNNLKTEDTAVYYCVRHGNFGNSYLSWWAYWGQGTLVTVSS

SEQ ID NO: 177 - protein, 109 aa, Artificial Sequence; identical to SEQ ID NO: 173
  Synthetic

SEQ ID NO: 178 - protein, 125 aa, Artificial Sequence
  Synthetic
EVQLVESGGGLVQPGGSLKLSCAASGFTFNVYAMNWVRQAPGKGLEWVARIRSKYNNYATYYADSVKKRFTISRDDSKNTTYLQMNNLKTEDTAVYYCVRHGNFGNSYLSWWAYWGQGTLVTVSS

SEQ ID NO: 179 - protein, 109 aa, Artificial Sequence; identical to SEQ ID NO: 173
  Synthetic

SEQ ID NO: 180 - protein, 125 aa, Artificial Sequence
  Synthetic
EVQLVESGGGLVQPGGSLKLSCAASGFTFNVYAMNWVRQAPGKGLEWVARIRSKYNNYATYYADSVKKRFTISRDDSKNTVYLQMNNLKTEDTAVYYCVRHGNFGNSYLSWWAYWGQGTLVTVSS

SEQ ID NO: 181 - protein, 109 aa, Artificial Sequence; identical to SEQ ID NO: 173
  Synthetic

SEQ ID NO: 182 - protein, 125 aa, Artificial Sequence
  Synthetic
EVQLVESGGGLVQPGGSLKLSCAASGFTFNVYAMNWVRQAPGKGMEWVARIRSKYNNYATYYADSVKKRFTISRDDSKNTAYLQMNNLKTEDTAVYYCVRHGNFGNSYLSWWAYWGQGTLVTVSS

SEQ ID NO: 183 - protein, 109 aa, Artificial Sequence; identical to SEQ ID NO: 173
  Synthetic

SEQ ID NO: 184 - protein, 125 aa, Artificial Sequence; identical to SEQ ID NO: 182
  Synthetic

SEQ ID NO: 185 - protein, 109 aa, Artificial Sequence
  Synthetic
QTVVTQEPSLTVSPGGTVTITCRSSTGAVTSGYYPNWVQKKPGQAPRGLIGATDMRPSGTPARFSGSLLGGKAALTLSGVQPEDEAEYYCALWYSNRWVFGSGTKLTVL

SEQ ID NO: 186 - protein, 125 aa, Artificial Sequence; identical to SEQ ID NO: 182
  Synthetic

SEQ ID NO: 187 - protein, 109 aa, Artificial Sequence
  Synthetic
QTVVTQEPSLTVSPGGTVTLTCRSSTGAVTSGYYPNWVQKKPGQAPRGLIGATDMRPSGTPARFSGSLLGGKAALTLSGVQPEDEAEYYCALWYSNRWVFGGGTKLTVL

SEQ ID NO: 188 - protein, 125 aa, Artificial Sequence; identical to SEQ ID NO: 182
  Synthetic

SEQ ID NO: 189 - protein, 109 aa, Artificial Sequence
  Synthetic
QTVVTQEPSLTVSPGGTVTLTCRSSTGAVTSGYYPNWVQKKPGQAPRGLIGATDMRPSGTPARFSGSLLGGKAALTLSGVQPEDEAEYYCALWYSNRWVFGSGTKLTVL

SEQ ID NO: 190 - protein, 125 aa, Artificial Sequence
  Synthetic
EVQLVESGGGLVQPGGSLKLSCAASGFTFNVYAMNWVRQAPGKGVEWVARIRSKYNNYATYYADSVKKRFTISRDDSKNTAYLQMNNLKTEDTAVYYCVRHGNFGNSYLSWWAYWGQGTLVTVSS

SEQ ID NO: 191 - protein, 109 aa, Artificial Sequence; identical to SEQ ID NO: 173
  Synthetic

SEQ ID NO: 192 - protein, 125 aa, Artificial Sequence; identical to SEQ ID NO: 190
  Synthetic

SEQ ID NO: 193 - protein, 109 aa, Artificial Sequence
  Synthetic
QTVVTQEPSLTVSPGGTVTLTCRSSTGAVTSGYYPNWFQQKPGQAPRGLIGATDMRPSGTPARFSGSLLGGKAALTLSGVQPEDEAEYYCALWYSNRWVFGGGTKLTVL

SEQ ID NO: 194 - protein, 125 aa, Artificial Sequence; identical to SEQ ID NO: 190
  Synthetic

SEQ ID NO: 195 - protein, 109 aa, Artificial Sequence
  Synthetic
QTVVTQEPSLTVSPGGTVTLTCRSSTGAVTSGYYPNWYQQKPGQAPRGLIGATDMRPSGTPARFSGSLLGGKAALTLSGVQPEDEAEYYCALWYSNRWVFGGGTKLTVL

SEQ ID NO: 196 - protein, 5 aa, Artificial Sequence
  Synthetic
VYAFN

SEQ ID NO: 197 - protein, 19 aa, Artificial Sequence
  Synthetic
RIRSKYNNYATYYADSVKK

SEQ ID NO: 198 - protein, 14 aa, Artificial Sequence
  Synthetic
HGNFGNSYLSWWAY

SEQ ID NO: 199 - protein, 14 aa, Artificial Sequence
  Synthetic
RSSTGAVTSGYYPN

SEQ ID NO: 200 - protein, 7 aa, Artificial Sequence
  Synthetic
ATDMRPS

SEQ ID NO: 201 - protein, 9 aa, Artificial Sequence
  Synthetic
ALWYSNRWV

SEQ ID NO: 202 - protein, 125 aa, Artificial Sequence
  Synthetic
EVQLVESGGGLVQPGGSLKLSCAASGFTFNVYAFNWVRQAPGKGLEWVARIRSKYNNYATYYADSVKKRFTISRDDSKNTVYLQMNNLKTEDTAVYYCVRHGNFGNSYLSWWAYWGQGTLVTVSS

SEQ ID NO: 203 - protein, 109 aa, Artificial Sequence; identical to SEQ ID NO: 173
  Synthetic

SEQ ID NO: 204 - protein, 5 aa, Artificial Sequence
  Synthetic
VYAIN

SEQ ID NO: 205 - protein, 19 aa, Artificial Sequence
  Synthetic
RIRSKYNNYATYYADSVKK

SEQ ID NO: 206 - protein, 14 aa, Artificial Sequence
  Synthetic
HGNFGNSYLSWWAY

SEQ ID NO: 207 - protein, 14 aa, Artificial Sequence
  Synthetic
RSSTGAVTSGYYPN

SEQ ID NO: 208 - protein, 7 aa, Artificial Sequence
  Synthetic
ATDMRPS

SEQ ID NO: 209 - protein, 9 aa, Artificial Sequence
  Synthetic
ALWYSNRWV

SEQ ID NO: 210 - protein, 125 aa, Artificial Sequence
  Synthetic
EVQLVESGGGLVQPGGSLKLSCAASGFTFNVYAINWVRQAPGKGLEWVARIRSKYNNYATYYADSVKKRFTISRDDSKNTAYLQMNNLKTEDTAVYYCVRHGNFGNSYLSWWAYWGQGTLVTVSS

SEQ ID NO: 211 - protein, 109 aa, Artificial Sequence; identical to SEQ ID NO: 173
  Synthetic

SEQ ID NO: 212 - protein, 125 aa, Artificial Sequence
  Synthetic
EVQLVESGGGLVQPGGSLKLSCAASGFTFNVYAINWVRQAPGKGLEWVARIRSKYNNYATYYADSVKKRFTISRDDSKNTLYLQMNNLKTEDTAVYYCVRHGNFGNSYLSWWAYWGQGTLVTVSS

SEQ ID NO: 213 - protein, 109 aa, Artificial Sequence; identical to SEQ ID NO: 173
  Synthetic

SEQ ID NO: 214 - protein, 125 aa, Artificial Sequence
  Synthetic
EVQLVESGGGLVQPGGSLKLSCAASGFTFNVYAINWVRQAPGKGLEWVARIRSKYNNYATYYADSVKKRFTISRDDSKNTVYLQMNNLKTEDTAVYYCVRHGNFGNSYLSWWAYWGQGTLVTVSS

SEQ ID NO: 215 - protein, 109 aa, Artificial Sequence; identical to SEQ ID NO: 173
  Synthetic

SEQ ID NO: 216 - protein, 125 aa, Artificial Sequence; identical to SEQ ID NO: 214
  Synthetic

SEQ ID NO: 217 - protein, 109 aa, Artificial Sequence; identical to SEQ ID NO: 185
  Synthetic

SEQ ID NO: 218 - protein, 125 aa, Artificial Sequence; identical to SEQ ID NO: 214
  Synthetic

SEQ ID NO: 219 - protein, 109 aa, Artificial Sequence; identical to SEQ ID NO: 187
  Synthetic

SEQ ID NO: 220 - protein, 125 aa, Artificial Sequence
  Synthetic
EVQLVESGGGLVQPGGSLKLSCAASGFTFNVYAINWVRQAPGKGVEWVARIRSKYNNYATYYADSVKKRFTISRDDSKNTVYLQMNNLKTEDTAVYYCVRHGNFGNSYLSWWAYWGQGTLVTVSS

SEQ ID NO: 221 - protein, 109 aa, Artificial Sequence
  Synthetic
QTVVTQEPSLTVSPGGTVTITCRSSTGAVTSGYYPNWFQKKPGQAPRGLIGATDMRPSGTPARFSGSLLGGKAALTLSGVQPEDEAEYYCALWYSNRWVFGSGTKLTVL

SEQ ID NO: 222 - protein, 125 aa, Artificial Sequence; identical to SEQ ID NO: 210
  Synthetic

SEQ ID NO: 223 - protein, 109 aa, Artificial Sequence; identical to SEQ ID NO: 185
  Synthetic

SEQ ID NO: 224 - protein, 125 aa, Artificial Sequence
  Synthetic
EVQLVESGGGLVQPGGSLKLSCAASGFTFNVYAINWVREAPGKGLEWVARIRSKYNNYATYYADSVKKRFTISRDDSKNTVYLQMNNLKTEDTAVYYCVRHGNFGNSYLSWWAYWGQGTLVTVSS

SEQ ID NO: 225 - protein, 109 aa, Artificial Sequence; identical to SEQ ID NO: 185
  Synthetic

SEQ ID NO: 226 - protein, 5 aa, Artificial Sequence
  Synthetic
VYAVN

SEQ ID NO: 227 - protein, 19 aa, Artificial Sequence
  Synthetic
RIRSKYNNYATYYADSVKK

SEQ ID NO: 228 - protein, 14 aa, Artificial Sequence
  Synthetic
HGNFGNSYLSWWAY

SEQ ID NO: 229 - protein, 14 aa, Artificial Sequence
  Synthetic
RSSTGAVTSGYYPN

SEQ ID NO: 230 - protein, 7 aa, Artificial Sequence
  Synthetic
ATDMRPS

SEQ ID NO: 231 - protein, 9 aa, Artificial Sequence
  Synthetic
ALWYSNRWV

SEQ ID NO: 232 - protein, 125 aa, Artificial Sequence
  Synthetic
EVQLVESGGGLVQPGGSLKLSCAASGFTFNVYAVNWVRQAPGKGLEWVARIRSKYNNYATYYADSVKKRFTISRDDSKNTAYLQMNNLKTEDTAVYYCVRHGNFGNSYLSWWAYWGQGTLVTVSS

SEQ ID NO: 233 - protein, 109 aa, Artificial Sequence; identical to SEQ ID NO: 173
  Synthetic

SEQ ID NO: 234 - protein, 125 aa, Artificial Sequence
  Synthetic
EVQLVESGGGLVQPGGSLKLSCAASGFTFNVYAMNWVRDAPGKGLEWVARIRSKYNNYATYYADSVKKRFTISRDDSKNTAYLQMNNLKTEDTAVYYCVRHGNFGNSYLSWWAYWGQGTLVTVSS

SEQ ID NO: 235 - protein, 109 aa, Artificial Sequence; identical to SEQ ID NO: 173
  Synthetic

SEQ ID NO: 236 - protein, 125 aa, Artificial Sequence; identical to SEQ ID NO: 234
  Synthetic

SEQ ID NO: 237 - protein, 109 aa, Artificial Sequence; identical to SEQ ID NO: 185
  Synthetic

SEQ ID NO: 238 - protein, 125 aa, Artificial Sequence; identical to SEQ ID NO: 234
  Synthetic

SEQ ID NO: 239 - protein, 109 aa, Artificial Sequence
  Synthetic
QTVVTQEPSLTVSPGGTVTITCRSSTGAVTSGYYPNWVQRKPGQAPRGLIGATDMRPSGTPARFSGSLLGGKAALTLSGVQPEDEAEYYCALWYSNRWVFGSGTKLTVL

SEQ ID NO: 240 - protein, 125 aa, Artificial Sequence; identical to SEQ ID NO: 234
  Synthetic

SEQ ID NO: 241 - protein, 109 aa, Artificial Sequence; identical to SEQ ID NO: 187
  Synthetic

SEQ ID NO: 242 - protein, 125 aa, Artificial Sequence; identical to SEQ ID NO: 234
  Synthetic

SEQ ID NO: 243 - protein, 109 aa, Artificial Sequence; identical to SEQ ID NO: 189
  Synthetic

SEQ ID NO: 244 - protein, 125 aa, Artificial Sequence; identical to SEQ ID NO: 234
  Synthetic

SEQ ID NO: 245 - protein, 109 aa, Artificial Sequence
  Synthetic
QTVVTQEPSLTVSPGGTVTLTCRSSTGAVTSGYYPNWVQRKPGQAPRGLIGATDMRPSGTPARFSGSLLGGKAALTLSGVQPEDEAEYYCALWYSNRWVFGGGTKLTVL

SEQ ID NO: 246 - protein, 125 aa, Artificial Sequence; identical to SEQ ID NO: 234
  Synthetic

SEQ ID NO: 247 - protein, 109 aa, Artificial Sequence
  Synthetic
QTVVTQEPSLTVSPGGTVTLTCRSSTGAVTSGYYPNWVQRKPGQAPRGLIGATDMRPSGTPARFSGSLLGGKAALTLSGVQPEDEAEYYCALWYSNRWVFGSGTKLTVL

SEQ ID NO: 248 - protein, 125 aa, Artificial Sequence
  Synthetic
EVQLVESGGGLVQPGGSLKLSCAASGFTFNVYAMNWVREAPGKGLEWVARIRSKYNNYATYYADSVKKRFTISRDDSKNTAYLQMNNLKTEDTAVYYCVRHGNFGNSYLSWWAYWGQGTLVTVSS

SEQ ID NO: 249 - protein, 109 aa, Artificial Sequence; identical to SEQ ID NO: 173
  Synthetic

SEQ ID NO: 250 - protein, 125 aa, Artificial Sequence; identical to SEQ ID NO: 248
  Synthetic

SEQ ID NO: 251 - protein, 109 aa, Artificial Sequence; identical to SEQ ID NO: 185
  Synthetic

SEQ ID NO: 252 - protein, 125 aa, Artificial Sequence; identical to SEQ ID NO: 248
  Synthetic

SEQ ID NO: 253 - protein, 109 aa, Artificial Sequence; identical to SEQ ID NO: 239
  Synthetic

SEQ ID NO: 254 - protein, 125 aa, Artificial Sequence; identical to SEQ ID NO: 248
  Synthetic

SEQ ID NO: 255 - protein, 109 aa, Artificial Sequence; identical to SEQ ID NO: 187
  Synthetic

SEQ ID NO: 256 - protein, 125 aa, Artificial Sequence; identical to SEQ ID NO: 248
  Synthetic

SEQ ID NO: 257 - protein, 109 aa, Artificial Sequence; identical to SEQ ID NO: 189
  Synthetic

SEQ ID NO: 258 - protein, 125 aa, Artificial Sequence; identical to SEQ ID NO: 248
  Synthetic

SEQ ID NO: 259 - protein, 109 aa, Artificial Sequence; identical to SEQ ID NO: 245
  Synthetic

SEQ ID NO: 260 - protein, 125 aa, Artificial Sequence; identical to SEQ ID NO: 248
  Synthetic

SEQ ID NO: 261 - protein, 109 aa, Artificial Sequence; identical to SEQ ID NO: 247
  Synthetic

SEQ ID NO: 262 - protein, 125 aa, Artificial Sequence
  Synthetic
EVQLVESGGGLVQPGGSLKLSCAASGFTFNVYAMNWVRKAPGKGLEWVARIRSKYNNYATYYADSVKKRFTISRDDSKNTAYLQMNNLKTEDTAVYYCVRHGNFGNSYLSWWAYWGQGTLVTVSS

SEQ ID NO: 263 - protein, 109 aa, Artificial Sequence; identical to SEQ ID NO: 173
  Synthetic

SEQ ID NO: 264 - protein, 125 aa, Artificial Sequence
  Synthetic
EVQLVESGGGLVQPGGSLKLSCAASGFTFNVYAMNWVRRAPGKGLEWVARIRSKYNNYATYYADSVKKRFTISRDDSKNTAYLQMNNLKTEDTAVYYCVRHGNFGNSYLSWWAYWGQGTLVTVSS

SEQ ID NO: 265 - protein, 109 aa, Artificial Sequence; identical to SEQ ID NO: 173
  Synthetic

SEQ ID NO: 266 - protein, 125 aa, Artificial Sequence
  Synthetic
EVQLVESGGGLVQPGGSLKLSCAASGFTFNVYAMNWVRQAPGKGLEWVARIRSKYNNYATYYADSVKKRFTISRDDSKNTAYLQMNNLKTEDTAVYYCARHGNFGNSYLSWWAYWGQGTLVTVSS

SEQ ID NO: 267 - protein, 109 aa, Artificial Sequence; identical to SEQ ID NO: 173
  Synthetic

SEQ ID NO: 268 - protein, 125 aa, Artificial Sequence
  Synthetic
EVQLVESGGGLVQPGGSLKLSCAASGFTFNVYAMNWVRQAPGKGLEWVARIRSKYNNYATYYADSVKKRFTISRDDSKNTAYLQMNNLKTEDTAVYYCLRHGNFGNSYLSWWAYWGQGTLVTVSS

SEQ ID NO: 269 - protein, 109 aa, Artificial Sequence; identical to SEQ ID NO: 173
  Synthetic

SEQ ID NO: 270 - protein, 5 aa, Artificial Sequence
  Synthetic
VYAMN

SEQ ID NO: 271 - protein, 19 aa, Artificial Sequence
  Synthetic
RIRSKYNNYATYYADSVKK

SEQ ID NO: 272 - protein, 14 aa, Artificial Sequence
  Synthetic
HGNFGNSYLSWFAY

SEQ ID NO: 273 - protein, 14 aa, Artificial Sequence
  Synthetic
RSSTGAVTSGYYPN

SEQ ID NO: 274 - protein, 7 aa, Artificial Sequence
  Synthetic
ATDMRPS

SEQ ID NO: 275 - protein, 9 aa, Artificial Sequence
  Synthetic
ALWYSNRWV

SEQ ID NO: 276 - protein, 125 aa, Artificial Sequence
  Synthetic
EVQLVESGGGLVQPGGSLKLSCAASGFTFNVYAMNWVRQAPGKGLEWVARIRSKYNNYATYYADSVKKRFTISRDDSKNTAYLQMNNLKTEDTAVYYCVRHGNFGNSYLSWFAYWGQGTLVTVSS

SEQ ID NO: 277 - protein, 109 aa, Artificial Sequence; identical to SEQ ID NO: 173
  Synthetic

SEQ ID NO: 278 - protein, 125 aa, Artificial Sequence; identical to SEQ ID NO: 276
  Synthetic

SEQ ID NO: 279 - protein, 109 aa, Artificial Sequence
  Synthetic
QTVVTQEPSLTVSPGGTVTLTCRSSTGAVTSGYYPNWIQQKPGQAPRGLIGATDMRPSGTPARFSGSLLGGKAALTLSGVQPEDEAEYYCALWYSNRWVFGGGTKLTVL

SEQ ID NO: 280 - protein, 125 aa, Artificial Sequence; identical to SEQ ID NO: 276
  Synthetic

SEQ ID NO: 281 - protein, 109 aa, Artificial Sequence
  Synthetic
QTVVTQEPSLTVSPGGTVTLTCRSSTGAVTSGYYPNWLQQKPGQAPRGLIGATDMRPSGTPARFSGSLLGGKAALTLSGVQPEDEAEYYCALWYSNRWVFGGGTKLTVL

SEQ ID NO: 282 - protein, 5 aa, Artificial Sequence
  Synthetic
VYAIN

SEQ ID NO: 283 - protein, 19 aa, Artificial Sequence
  Synthetic
RIRSKYNNYATYYADAVKK

SEQ ID NO: 284 - protein, 14 aa, Artificial Sequence
  Synthetic
AGNFGSSYLSWWAY

SEQ ID NO: 285 - protein, 14 aa, Artificial Sequence
  Synthetic
RSSTGAVTSGYYPN

SEQ ID NO: 286 - protein, 7 aa, Artificial Sequence
  Synthetic
ATDMRPS

SEQ ID NO: 287 - protein, 9 aa, Artificial Sequence
  Synthetic
ALWYSNRWV

SEQ ID NO: 288 - protein, 125 aa, Artificial Sequence
  Synthetic
EVQLVESGGGLVQPGGSLKLSCAASGFTFNVYAINWVRQAPGKGLEWVARIRSKYNNYATYYADAVKKRFTISRDDSKNTVYLQMNNLKTEDTAVYYCARAGNFGSSYLSWWAYWGQGTLVTVSS

SEQ ID NO: 289 - protein, 109 aa, Artificial Sequence
  Synthetic
QTVVTQEPSLTVSPGGTVTITCRSSTGAVTSGYYPNWVQKKPGQAPRGLIGATDMRPSGTPARFSGSLSGGKAALTLSGVQPEDEAEYYCALWYSNRWVFGSGTKLTVL

SEQ ID NO: 290 - protein, 5 aa, Artificial Sequence
  Synthetic
VYAMN

SEQ ID NO: 291 - protein, 19 aa, Artificial Sequence
  Synthetic
RIRSKYNNYATYYAEAVKG

SEQ ID NO: 292 - protein, 14 aa, Artificial Sequence
  Synthetic
NENIGTSYLSWWAY

SEQ ID NO: 293 - protein, 14 aa, Artificial Sequence
  Synthetic
RSSTGAVTSGYYPN

SEQ ID NO: 294 - protein, 7 aa, Artificial Sequence
  Synthetic
ATDMRPS

SEQ ID NO: 295 - protein, 9 aa, Artificial Sequence
  Synthetic
ALWYSNRWV

SEQ ID NO: 296 - protein, 125 aa, Artificial Sequence
  Synthetic
EVQLVESGGGLVQPGGSLKLSCAASGFTFNVYAMNWVRQAPGKGLEWVARIRSKYNNYATYYAEAVKGRFTISRDDSKNTVYLQMNNLKTEDTAVYYCVRNENIGTSYLSWWAYWGQGTLVTVSS

SEQ ID NO: 297 - protein, 109 aa, Artificial Sequence
  Synthetic
QTVVTQEPSLTVSPGGTVTITCRSSTGAVTSGYYPNWVQQKPGQAPRGLIGATDMRPSGTPARFSGSLSGGKAALTLSGVQPEDEAEYYCALWYSNRWVFGSGTKLTVL

SEQ ID NO: 298 - protein, 5 aa, Artificial Sequence
  Synthetic
VYAMN

SEQ ID NO: 299 - protein, 19 aa, Artificial Sequence
  Synthetic
RIRSKYNNYATYYADAVKK

SEQ ID NO: 300 - protein, 14 aa, Artificial Sequence
  Synthetic
AGNFGSSYLSWFAY

SEQ ID NO: 301 - protein, 14 aa, Artificial Sequence
  Synthetic
RSSTGAVTSGYYPN

SEQ ID NO: 302 - protein, 7 aa, Artificial Sequence
  Synthetic
ATDMRPS

SEQ ID NO: 303 - protein, 9 aa, Artificial Sequence
  Synthetic
ALYYSNRWV

SEQ ID NO: 304 - protein, 125 aa, Artificial Sequence
  Synthetic
EVQLVESGGGLVQPGGSLKLSCAASGFTFNVYAMNWVRQAPGKGMEWVARIRSKYNNYATYYADAVKKRFTISRDDSKNTLYLQMNNLKTEDTAVYYCVRAGNFGSSYLSWFAYWGQGTLVTVSS

SEQ ID NO: 305 - protein, 109 aa, Artificial Sequence
  Synthetic
QTVVTQEPSLTVSPGGTVTITCRSSTGAVTSGYYPNWIQKKPGQAPRGLIGATDMRPSGTPARFSGSLEGGKAALTLSGVQPEDEAEYYCALYYSNRWVFGSGTKLTVL

SEQ ID NO: 306 - protein, 5 aa, Artificial Sequence
  Synthetic
VYAMN

SEQ ID NO: 307 - protein, 19 aa, Artificial Sequence
  Synthetic
RIRSKYNNYATYYADAVKK

SEQ ID NO: 308 - protein, 14 aa, Artificial Sequence
  Synthetic
AGNFGTSYLSWWAY

SEQ ID NO: 309 - protein, 14 aa, Artificial Sequence
  Synthetic
RSSTGAVTSGYYPN

SEQ ID NO: 310 - protein, 7 aa, Artificial Sequence
  Synthetic
ATDMRPS

SEQ ID NO: 311 - protein, 9 aa, Artificial Sequence
  Synthetic
ALWYSNRWV

SEQ ID NO: 312 - protein, 125 aa, Artificial Sequence
  Synthetic
EVQLVESGGGLVQPGGSLKLSCAASGFTFNVYAMNWVRQAPGKGMEWVARIRSKYNNYATYYADAVKKRFTISRDDSKNTLYLQMNNLKTEDTAVYYCVRAGNFGTSYLSWWAYWGQGTLVTVSS

SEQ ID NO: 313 - protein, 109 aa, Artificial Sequence; identical to SEQ ID NO: 289
  Synthetic

SEQ ID NO: 314 - protein, 5 aa, Artificial Sequence
  Synthetic
VYAIN

SEQ ID NO: 315 - protein, 19 aa, Artificial Sequence
  Synthetic
RIRSKYNNYATYYADAVKK

SEQ ID NO: 316 - protein, 14 aa, Artificial Sequence
  Synthetic
NANFGTSYLSWFAY

SEQ ID NO: 317 - protein, 14 aa, Artificial Sequence
  Synthetic
RSSTGAVTSGYYPN

SEQ ID NO: 318 - protein, 7 aa, Artificial Sequence
  Synthetic
ATDMRPS

SEQ ID NO: 319 - protein, 9 aa, Artificial Sequence
  Synthetic
ALWYSNRWV

SEQ ID NO: 320 - protein, 125 aa, Artificial Sequence
  Synthetic
EVQLVESGGGLVQPGGSLKLSCAASGFTFNVYAINWVREAPGKGLEWVARIRSKYNNYATYYADAVKKRFTISRDDSKNTAYLQMNNLKTEDTAVYYCVRNANFGTSYLSWFAYWGQGTLVTVSS

SEQ ID NO: 321 - protein, 109 aa, Artificial Sequence; identical to SEQ ID NO: 189
  Synthetic

SEQ ID NO: 322 - protein, 125 aa, Artificial Sequence; identical to SEQ ID NO: 172
  Synthetic

SEQ ID NO: 323 - protein, 109 aa, Artificial Sequence
  Synthetic
QTVVTQEPSLTVSPGGTVTLTCRSSTGAVTSGYYPNWVQQKPGQAPRGLIGATDMRPSGTPARFSGSLLGGKAALTLSGVQPEDEAEYYCALWYSNRWVFGSGTKLTVL

SEQ ID NO: 324 - protein, 125 aa, Artificial Sequence; identical to SEQ ID NO: 172
  Synthetic

SEQ ID NO: 325 - protein, 109 aa, Artificial Sequence
  Synthetic
QTVVTQEPSLTVSPGGTVTITCRSSTGAVTSGYYPNWVQQKPGQAPRGLIGATDMRPSGTPARFSGSLLGGKAALTLSGVQPEDEAEYYCALWYSNRWVFGSGTKLTVL

SEQ ID NO: 326 - protein, 125 aa, Artificial Sequence; identical to SEQ ID NO: 172
  Synthetic

SEQ ID NO: 327 - protein, 109 aa, Artificial Sequence
  Synthetic
QTVVTQEPSLTVSPGGTVTLTCRSSTGAVTSGYYPNWVQQKPGQAPRGLIGATDMRPSGTPARFSGSLEGGKAALTLSGVQPEDEAEYYCALWYSNRWVFGGGTKLTVL

SEQ ID NO: 328 - protein, 125 aa, Artificial Sequence; identical to SEQ ID NO: 172
  Synthetic

SEQ ID NO: 329 - protein, 109 aa, Artificial Sequence
  Synthetic
QTVVTQEPSLTVSPGGTVTLTCRSSTGAVTSGYYPNWVQQKPGQAPRGLIGATDMRPSGTPARFSGSLSGGKAALTLSGVQPEDEAEYYCALWYSNRWVFGGGTKLTVL

SEQ ID NO: 330 - protein, 125 aa, Artificial Sequence; identical to SEQ ID NO: 172
  Synthetic

SEQ ID NO: 331 - protein, 109 aa, Artificial Sequence
  Synthetic
QTVVTQEPSLTVSPGGTVTLTCRSSTGAVTSGYYPNWVQEKPGQAPRGLIGATDMRPSGTPARFSGSLLGGKAALTLSGVQPEDEAEYYCALWYSNRWVFGGGTKLTVL

SEQ ID NO: 332 - protein, 125 aa, Artificial Sequence; identical to SEQ ID NO: 172
  Synthetic

SEQ ID NO: 333 - protein, 109 aa, Artificial Sequence; identical to SEQ ID NO: 187
  Synthetic

SEQ ID NO: 334 - protein, 5 aa, Artificial Sequence
  Synthetic
VYAMN

SEQ ID NO: 335 - protein, 19 aa, Artificial Sequence
  Synthetic
RIRSKYNNYATYYADSVKK

SEQ ID NO: 336 - protein, 14 aa, Artificial Sequence
  Synthetic
HGNFGNSYLSWWAY

SEQ ID NO: 337 - protein, 14 aa, Artificial Sequence
  Synthetic
RSSTGAVTSGYYPN

SEQ ID NO: 338 - protein, 7 aa, Artificial Sequence
  Synthetic
ATDMRPS

SEQ ID NO: 339 - protein, 9 aa, Artificial Sequence
  Synthetic
LLWYSNRWV

SEQ ID NO: 340 - protein, 125 aa, Artificial Sequence; identical to SEQ ID NO: 172
  Synthetic

SEQ ID NO: 341 - protein, 109 aa, Artificial Sequence
  Synthetic
QTVVTQEPSLTVSPGGTVTLTCRSSTGAVTSGYYPNWVQQKPGQAPRGLIGATDMRPSGTPARFSGSLLGGKAALTLSGVQPEDEAEYYCLLWYSNRWVFGGGTKLTVL

SEQ ID NO: 342 - protein, 125 aa, Artificial Sequence; identical to SEQ ID NO: 172
  Synthetic

SEQ ID NO: 343 - protein, 109 aa, Artificial Sequence; identical to SEQ ID NO: 279
  Synthetic

SEQ ID NO: 344 - protein, 125 aa, Artificial Sequence; identical to SEQ ID NO: 172
  Synthetic

SEQ ID NO: 345 - protein, 109 aa, Artificial Sequence; identical to SEQ ID NO: 281
  Synthetic

SEQ ID NO: 346 - protein, 125 aa, Artificial Sequence; identical to SEQ ID NO: 172
  Synthetic

SEQ ID NO: 347 - protein, 109 aa, Artificial Sequence
  Synthetic
QTVVTQEPSLTVSPGGTVTLTCRSSTGAVTSGYYPNWMQQKPGQAPRGLIGATDMRPSGTPARFSGSLLGGKAALTLSGVQPEDEAEYYCALWYSNRWVFGGGTKLTVL

SEQ ID NO: 348 - protein, 5 aa, Artificial Sequence
  Synthetic
VYAMN

SEQ ID NO: 349 - protein, 19 aa, Artificial Sequence
  Synthetic
RIRSKYNNYATYYADSVKK

SEQ ID NO: 350 - protein, 14 aa, Artificial Sequence
  Synthetic
HGNFGNSYLSWWAY

SEQ ID NO: 351 - protein, 14 aa, Artificial Sequence
  Synthetic
RSSTGAVTSGYYPN

SEQ ID NO: 352 - protein, 7 aa, Artificial Sequence
  Synthetic
ATDMRPS

SEQ ID NO: 353 - protein, 9 aa, Artificial Sequence
  Synthetic
ALYYSNRWV

SEQ ID NO: 354 - protein, 125 aa, Artificial Sequence; identical to SEQ ID NO: 172
  Synthetic

SEQ ID NO: 355 - protein, 109 aa, Artificial Sequence
  Synthetic
QTVVTQEPSLTVSPGGTVTLTCRSSTGAVTSGYYPNWVQQKPGQAPRGLIGATDMRPSGTPARFSGSLLGGKAALTLSGVQPEDEAEYYCALYYSNRWVFGGGTKLTVL

SEQ ID NO: 356 - protein, 5 aa, Artificial Sequence
  Synthetic
KYAMN

SEQ ID NO: 357 - protein, 19 aa, Artificial Sequence
  Synthetic
RIRSKYNNYATYYADSVKS

SEQ ID NO: 358 - protein, 14 aa, Artificial Sequence
  Synthetic
HGNFGNSYTSYYAY

SEQ ID NO: 359 - protein, 14 aa, Artificial Sequence
  Synthetic
GSSTGAVTSGYYPN

SEQ ID NO: 360 - protein, 7 aa, Artificial Sequence
  Synthetic
GTKFLAP

SEQ ID NO: 361 - protein, 9 aa, Artificial Sequence
  Synthetic
ALWYSNRWV

SEQ ID NO: 362 - protein, 125 aa, Artificial Sequence
  Synthetic
EVQLVESGGGLVQPGGSLKLSCAASGFTFNKYAMNWVRQAPGKGLEWVARIRSKYNNYATYYADSVKSRFTISRDDSKNTAYLQMNNLKTEDTAVYYCVRHGNFGNSYTSYYAYWGQGTLVTVSS

SEQ ID NO: 363 - protein, 109 aa, Artificial Sequence
  Synthetic
QTVVTQEPSLTVSPGGTVTLTCGSSTGAVTSGYYPNWVQQKPGQAPRGLIGGTKFLAPGTPARFSGSLLGGKAALTLSGVQPEDEAEYYCALWYSNRWVFGGGTKLTVL

SEQ ID NO: 364 - protein, 125 aa, Artificial Sequence
  Synthetic
EVQLVESGGGLVQPGGSLKLSCAASGFTFNKYAMNWVRQAPGKGLEWVARIRSKYNNYATYYADSVKSRFTISRDDSKNTIYLQMNNLKTEDTAVYYCVRHGNFGNSYTSYYAYWGQGTLVTVSS

SEQ ID NO: 365 - protein, 109 aa, Artificial Sequence; identical to SEQ ID NO: 363
  Synthetic

SEQ ID NO: 366 - protein, 125 aa, Artificial Sequence
  Synthetic
EVQLVESGGGLVQPGGSLKLSCAASGFTFNKYAMNWVRQAPGKGLEWVARIRSKYNNYATYYADSVKSRFTISRDDSKNTLYLQMNNLKTEDTAVYYCVRHGNFGNSYTSYYAYWGQGTLVTVSS

SEQ ID NO: 367 - protein, 109 aa, Artificial Sequence; identical to SEQ ID NO: 363
  Synthetic

SEQ ID NO: 368 - protein, 125 aa, Artificial Sequence
  Synthetic
EVQLVESGGGLVQPGGSLKLSCAASGFTFNKYAMNWVRQAPGKGLEWVARIRSKYNNYATYYADSVKSRFTISRDDSKNTTYLQMNNLKTEDTAVYYCVRHGNFGNSYTSYYAYWGQGTLVTVSS

SEQ ID NO: 369 - protein, 109 aa, Artificial Sequence; identical to SEQ ID NO: 363
  Synthetic

SEQ ID NO: 370 - protein, 125 aa, Artificial Sequence
  Synthetic
EVQLVESGGGLVQPGGSLKLSCAASGFTFNKYAMNWVRQAPGKGLEWVARIRSKYNNYATYYADSVKSRFTISRDDSKNTVYLQMNNLKTEDTAVYYCVRHGNFGNSYTSYYAYWGQGTLVTVSS

SEQ ID NO: 371 - protein, 109 aa, Artificial Sequence; identical to SEQ ID NO: 363
  Synthetic

SEQ ID NO: 372 - protein, 125 aa, Artificial Sequence
  Synthetic
EVQLVESGGGLVQPGGSLKLSCAASGFTFNKYAMNWVRQAPGKGMEWVARIRSKYNNYATYYADSVKSRFTISRDDSKNTAYLQMNNLKTEDTAVYYCVRHGNFGNSYTSYYAYWGQGTLVTVSS

SEQ ID NO: 373 - protein, 109 aa, Artificial Sequence; identical to SEQ ID NO: 363
  Synthetic

SEQ ID NO: 374 - protein, 125 aa, Artificial Sequence; identical to SEQ ID NO: 372
  Synthetic

SEQ ID NO: 375 - protein, 109 aa, Artificial Sequence
  Synthetic
QTVVTQEPSLTVSPGGTVTITCGSSTGAVTSGYYPNWVQKKPGQAPRGLIGGTKFLAPGTPARFSGSLLGGKAALTLSGVQPEDEAEYYCALWYSNRWVFGSGTKLTVL

SEQ ID NO: 376 - protein, 125 aa, Artificial Sequence; identical to SEQ ID NO: 372
  Synthetic

SEQ ID NO: 377 - protein, 109 aa, Artificial Sequence
  Synthetic
QTVVTQEPSLTVSPGGTVTLTCGSSTGAVTSGYYPNWVQKKPGQAPRGLIGGTKFLAPGTPARFSGSLLGGKAALTLSGVQPEDEAEYYCALWYSNRWVFGGGTKLTVL

SEQ ID NO: 378 - protein, 125 aa, Artificial Sequence; identical to SEQ ID NO: 372
  Synthetic

SEQ ID NO: 379 - protein, 109 aa, Artificial Sequence
  Synthetic
QTVVTQEPSLTVSPGGTVTLTCGSSTGAVTSGYYPNWVQKKPGQAPRGLIGGTKFLAPGTPARFSGSLLGGKAALTLSGVQPEDEAEYYCALWYSNRWVFGSGTKLTVL

SEQ ID NO: 380 - protein, 125 aa, Artificial Sequence
  Synthetic
EVQLVESGGGLVQPGGSLKLSCAASGFTFNKYAMNWVRQAPGKGVEWVARIRSKYNNYATYYADSVKSRFTISRDDSKNTAYLQMNNLKTEDTAVYYCVRHGNFGNSYTSYYAYWGQGTLVTVSS

SEQ ID NO: 381 - protein, 109 aa, Artificial Sequence; identical to SEQ ID NO: 363
  Synthetic

SEQ ID NO: 382 - protein, 125 aa, Artificial Sequence; identical to SEQ ID NO: 380
  Synthetic

SEQ ID NO: 383 - protein, 109 aa, Artificial Sequence
  Synthetic
QTVVTQEPSLTVSPGGTVTLTCGSSTGAVTSGYYPNWFQQKPGQAPRGLIGGTKFLAPGTPARFSGSLLGGKAALTLSGVQPEDEAEYYCALWYSNRWVFGGGTKLTVL

SEQ ID NO: 384 - protein, 125 aa, Artificial Sequence; identical to SEQ ID NO: 380
  Synthetic

SEQ ID NO: 385 - protein, 109 aa, Artificial Sequence
  Synthetic
QTVVTQEPSLTVSPGGTVTLTCGSSTGAVTSGYYPNWYQQKPGQAPRGLIGGTKFLAPGTPARFSGSLLGGKAALTLSGVQPEDEAEYYCALWYSNRWVFGGGTKLTVL

SEQ ID NO: 386 - protein, 5 aa, Artificial Sequence
  Synthetic
KYAFN

SEQ ID NO: 387 - protein, 19 aa, Artificial Sequence
  Synthetic
RIRSKYNNYATYYADSVKS

SEQ ID NO: 388 - protein, 14 aa, Artificial Sequence
  Synthetic
HGNFGNSYTSYYAY

SEQ ID NO: 389 - protein, 14 aa, Artificial Sequence
  Synthetic
GSSTGAVTSGYYPN

SEQ ID NO: 390 - protein, 7 aa, Artificial Sequence
  Synthetic
GTKFLAP

SEQ ID NO: 391 - protein, 9 aa, Artificial Sequence
  Synthetic
ALWYSNRWV

SEQ ID NO: 392 - protein, 125 aa, Artificial Sequence
  Synthetic
EVQLVESGGGLVQPGGSLKLSCAASGFTFNKYAFNWVRQAPGKGLEWVARIRSKYNNYATYYADSVKSRFTISRDDSKNTVYLQMNNLKTEDTAVYYCVRHGNFGNSYTSYYAYWGQGTLVTVSS

SEQ ID NO: 393 - protein, 109 aa, Artificial Sequence; identical to SEQ ID NO: 363
  Synthetic

SEQ ID NO: 394 - protein, 5 aa, Artificial Sequence
  Synthetic
KYAIN

SEQ ID NO: 395 - protein, 19 aa, Artificial Sequence
  Synthetic
RIRSKYNNYATYYADSVKS

SEQ ID NO: 396 - protein, 14 aa, Artificial Sequence
  Synthetic
HGNFGNSYTSYYAY

SEQ ID NO: 397 - protein, 14 aa, Artificial Sequence
  Synthetic
GSSTGAVTSGYYPN

SEQ ID NO: 398 - protein, 7 aa, Artificial Sequence
  Synthetic
GTKFLAP

SEQ ID NO: 399 - protein, 9 aa, Artificial Sequence
  Synthetic
ALWYSNRWV

SEQ ID NO: 400 - protein, 125 aa, Artificial Sequence
  Synthetic
EVQLVESGGGLVQPGGSLKLSCAASGFTFNKYAINWVRQAPGKGLEWVARIRSKYNNYATYYADSVKSRFTISRDDSKNTAYLQMNNLKTEDTAVYYCVRHGNFGNSYTSYYAYWGQGTLVTVSS

SEQ ID NO: 401 - protein, 109 aa, Artificial Sequence; identical to SEQ ID NO: 363
  Synthetic

SEQ ID NO: 402 - protein, 125 aa, Artificial Sequence
  Synthetic
EVQLVESGGGLVQPGGSLKLSCAASGFTFNKYAINWVRQAPGKGLEWVARIRSKYNNYATYYADSVKSRFTISRDDSKNTLYLQMNNLKTEDTAVYYCVRHGNFGNSYTSYYAYWGQGTLVTVSS

SEQ ID NO: 403 - protein, 109 aa, Artificial Sequence; identical to SEQ ID NO: 363
  Synthetic

SEQ ID NO: 404 - protein, 125 aa, Artificial Sequence
  Synthetic
EVQLVESGGGLVQPGGSLKLSCAASGFTFNKYAINWVRQAPGKGLEWVARIRSKYNNYATYYADSVKSRFTISRDDSKNTVYLQMNNLKTEDTAVYYCVRHGNFGNSYTSYYAYWGQGTLVTVSS

SEQ ID NO: 405 - protein, 109 aa, Artificial Sequence; identical to SEQ ID NO: 363
  Synthetic

SEQ ID NO: 406 - protein, 125 aa, Artificial Sequence; identical to SEQ ID NO: 404
  Synthetic

SEQ ID NO: 407 - protein, 109 aa, Artificial Sequence; identical to SEQ ID NO: 375
  Synthetic

SEQ ID NO: 408 - protein, 125 aa, Artificial Sequence; identical to SEQ ID NO: 404
  Synthetic

SEQ ID NO: 409 - protein, 109 aa, Artificial Sequence; identical to SEQ ID NO: 377
  Synthetic

SEQ ID NO: 410 - protein, 125 aa, Artificial Sequence
  Synthetic
EVQLVESGGGLVQPGGSLKLSCAASGFTFNKYAINWVRQAPGKGVEWVARIRSKYNNYATYYADSVKSRFTISRDDSKNTVYLQMNNLKTEDTAVYYCVRHGNFGNSYTSYYAYWGQGTLVTVSS

SEQ ID NO: 411 - protein, 109 aa, Artificial Sequence
  Synthetic
QTVVTQEPSLTVSPGGTVTITCGSSTGAVTSGYYPNWFQKKPGQAPRGLIGGTKFLAPGTPARFSGSLLGGKAALTLSGVQPEDEAEYYCALWYSNRWVFGSGTKLTVL

SEQ ID NO: 412 - protein, 125 aa, Artificial Sequence; identical to SEQ ID NO: 400
  Synthetic

SEQ ID NO: 413 - protein, 109 aa, Artificial Sequence; identical to SEQ ID NO: 375
  Synthetic

SEQ ID NO: 414 - protein, 125 aa, Artificial Sequence
  Synthetic
EVQLVESGGGLVQPGGSLKLSCAASGFTFNKYAINWVREAPGKGLEWVARIRSKYNNYATYYADSVKSRFTISRDDSKNTVYLQMNNLKTEDTAVYYCVRHGNFGNSYTSYYAYWGQGTLVTVSS

SEQ ID NO: 415 - protein, 109 aa, Artificial Sequence; identical to SEQ ID NO: 375
  Synthetic

SEQ ID NO: 416 - protein, 5 aa, Artificial Sequence
  Synthetic
KYAVN

SEQ ID NO: 417 - protein, 19 aa, Artificial Sequence
  Synthetic
RIRSKYNNYATYYADSVKS

SEQ ID NO: 418 - protein, 14 aa, Artificial Sequence
  Synthetic
HGNFGNSYTSYYAY

SEQ ID NO: 419 - protein, 14 aa, Artificial Sequence
  Synthetic
GSSTGAVTSGYYPN

SEQ ID NO: 420 - protein, 7 aa, Artificial Sequence
  Synthetic
GTKFLAP

SEQ ID NO: 421 - protein, 9 aa, Artificial Sequence
  Synthetic
ALWYSNRWV

SEQ ID NO: 422 - protein, 125 aa, Artificial Sequence
  Synthetic
EVQLVESGGGLVQPGGSLKLSCAASGFTFNKYAVNWVRQAPGKGLEWVARIRSKYNNYATYYADSVKSRFTISRDDSKNTAYLQMNNLKTEDTAVYYCVRHGNFGNSYTSYYAYWGQGTLVTVSS

SEQ ID NO: 423 - protein, 109 aa, Artificial Sequence; identical to SEQ ID NO: 363
  Synthetic

SEQ ID NO: 424 - protein, 125 aa, Artificial Sequence
  Synthetic
EVQLVESGGGLVQPGGSLKLSCAASGFTFNKYAMNWVRDAPGKGLEWVARIRSKYNNYATYYADSVKSRFTISRDDSKNTAYLQMNNLKTEDTAVYYCVRHGNFGNSYTSYYAYWGQGTLVTVSS

SEQ ID NO: 425 - protein, 109 aa, Artificial Sequence; identical to SEQ ID NO: 363
  Synthetic

SEQ ID NO: 426 - protein, 125 aa, Artificial Sequence; identical to SEQ ID NO: 424
  Synthetic

SEQ ID NO: 427 - protein, 109 aa, Artificial Sequence; identical to SEQ ID NO: 375
  Synthetic

SEQ ID NO: 428 - protein, 125 aa, Artificial Sequence; identical to SEQ ID NO: 424
  Synthetic

SEQ ID NO: 429 - protein, 109 aa, Artificial Sequence
  Synthetic
QTVVTQEPSLTVSPGGTVTITCGSSTGAVTSGYYPNWVQRKPGQAPRGLIGGTKFLAPGTPARFSGSLLGGKAALTLSGVQPEDEAEYYCALWYSNRWVFGSGTKLTVL

SEQ ID NO: 430 - protein, 125 aa, Artificial Sequence; identical to SEQ ID NO: 424
  Synthetic

SEQ ID NO: 431 - protein, 109 aa, Artificial Sequence; identical to SEQ ID NO: 377
  Synthetic

SEQ ID NO: 432 - protein, 125 aa, Artificial Sequence; identical to SEQ ID NO: 424
  Synthetic

SEQ ID NO: 433 - protein, 109 aa, Artificial Sequence; identical to SEQ ID NO: 379
  Synthetic

SEQ ID NO: 434 - protein, 125 aa, Artificial Sequence; identical to SEQ ID NO: 424
  Synthetic

SEQ ID NO: 435 - protein, 109 aa, Artificial Sequence
  Synthetic
QTVVTQEPSLTVSPGGTVTLTCGSSTGAVTSGYYPNWVQRKPGQAPRGLIGGTKFLAPGTPARFSGSLLGGKAALTLSGVQPEDEAEYYCALWYSNRWVFGGGTKLTVL

SEQ ID NO: 436 - protein, 125 aa, Artificial Sequence; identical to SEQ ID NO: 424
  Synthetic

SEQ ID NO: 437 - protein, 109 aa, Artificial Sequence
  Synthetic
QTVVTQEPSLTVSPGGTVTLTCGSSTGAVTSGYYPNWVQRKPGQAPRGLIGGTKFLAPGTPARFSGSLLGGKAALTLSGVQPEDEAEYYCALWYSNRWVFGSGTKLTVL

SEQ ID NO: 438 - protein, 125 aa, Artificial Sequence
  Synthetic
EVQLVESGGGLVQPGGSLKLSCAASGFTFNKYAMNWVREAPGKGLEWVARIRSKYNNYATYYADSVKSRFTISRDDSKNTAYLQMNNLKTEDTAVYYCVRHGNFGNSYTSYYAYWGQGTLVTVSS

SEQ ID NO: 439 - protein, 109 aa, Artificial Sequence; identical to SEQ ID NO: 363
  Synthetic

SEQ ID NO: 440 - protein, 125 aa, Artificial Sequence; identical to SEQ ID NO: 438
  Synthetic

SEQ ID NO: 441 - protein, 109 aa, Artificial Sequence; identical to SEQ ID NO: 375
  Synthetic

SEQ ID NO: 442 - protein, 125 aa, Artificial Sequence; identical to SEQ ID NO: 438
  Synthetic

SEQ ID NO: 443 - protein, 109 aa, Artificial Sequence; identical to SEQ ID NO: 429
  Synthetic

SEQ ID NO: 444 - protein, 125 aa, Artificial Sequence; identical to SEQ ID NO: 438
  Synthetic

SEQ ID NO: 445 - protein, 109 aa, Artificial Sequence; identical to SEQ ID NO: 377
  Synthetic

SEQ ID NO: 446 - protein, 125 aa, Artificial Sequence; identical to SEQ ID NO: 438
  Synthetic

SEQ ID NO: 447 - protein, 109 aa, Artificial Sequence; identical to SEQ ID NO: 379
  Synthetic

SEQ ID NO: 448 - protein, 125 aa, Artificial Sequence; identical to SEQ ID NO: 438
  Synthetic

SEQ ID NO: 449 - protein, 109 aa, Artificial Sequence; identical to SEQ ID NO: 435
  Synthetic

SEQ ID NO: 450 - protein, 125 aa, Artificial Sequence; identical to SEQ ID NO: 438
  Synthetic

SEQ ID NO: 451 - protein, 109 aa, Artificial Sequence; identical to SEQ ID NO: 437
  Synthetic

SEQ ID NO: 452 - protein, 125 aa, Artificial Sequence
  Synthetic
EVQLVESGGGLVQPGGSLKLSCAASGFTFNKYAMNWVRKAPGKGLEWVARIRSKYNNYATYYADSVKSRFTISRDDSKNTAYLQMNNLKTEDTAVYYCVRHGNFGNSYTSYYAYWGQGTLVTVSS

SEQ ID NO: 453 - protein, 109 aa, Artificial Sequence; identical to SEQ ID NO: 363
  Synthetic

SEQ ID NO: 454 - protein, 125 aa, Artificial Sequence
  Synthetic
EVQLVESGGGLVQPGGSLKLSCAASGFTFNKYAMNWVRRAPGKGLEWVARIRSKYNNYATYYADSVKSRFTISRDDSKNTAYLQMNNLKTEDTAVYYCVRHGNFGNSYTSYYAYWGQGTLVTVSS

SEQ ID NO: 455 - protein, 109 aa, Artificial Sequence; identical to SEQ ID NO: 363
  Synthetic

SEQ ID NO: 456 - protein, 125 aa, Artificial Sequence
  Synthetic
EVQLVESGGGLVQPGGSLKLSCAASGFTFNKYAMNWVRQAPGKGLEWVARIRSKYNNYATYYADSVKSRFTISRDDSKNTAYLQMNNLKTEDTAVYYCARHGNFGNSYTSYYAYWGQGTLVTVSS

SEQ ID NO: 457 - protein, 109 aa, Artificial Sequence; identical to SEQ ID NO: 363
  Synthetic

SEQ ID NO: 458 - protein, 125 aa, Artificial Sequence
  Synthetic
EVQLVESGGGLVQPGGSLKLSCAASGFTFNKYAMNWVRQAPGKGLEWVARIRSKYNNYATYYADSVKSRFTISRDDSKNTAYLQMNNLKTEDTAVYYCLRHGNFGNSYTSYYAYWGQGTLVTVSS

SEQ ID NO: 459 - protein, 109 aa, Artificial Sequence; identical to SEQ ID NO: 363
  Synthetic

SEQ ID NO: 460 - protein, 5 aa, Artificial Sequence
  Synthetic
KYAMN

SEQ ID NO: 461 - protein, 19 aa, Artificial Sequence
  Synthetic
RIRSKYNNYATYYADSVKS

SEQ ID NO: 462 - protein, 14 aa, Artificial Sequence
  Synthetic
HGNFGNSYTSYFAY

SEQ ID NO: 463 - protein, 14 aa, Artificial Sequence
  Synthetic
GSSTGAVTSGYYPN

SEQ ID NO: 464 - protein, 7 aa, Artificial Sequence
  Synthetic
GTKFLAP

SEQ ID NO: 465 - protein, 9 aa, Artificial Sequence
  Synthetic
ALWYSNRWV

SEQ ID NO: 466 - protein, 125 aa, Artificial Sequence
  Synthetic
EVQLVESGGGLVQPGGSLKLSCAASGFTFNKYAMNWVRQAPGKGLEWVARIRSKYNNYATYYADSVKSRFTISRDDSKNTAYLQMNNLKTEDTAVYYCVRHGNFGNSYTSYFAYWGQGTLVTVSS

SEQ ID NO: 467 - protein, 109 aa, Artificial Sequence; identical to SEQ ID NO: 363
  Synthetic

SEQ ID NO: 468 - protein, 125 aa, Artificial Sequence; identical to SEQ ID NO: 466
  Synthetic

SEQ ID NO: 469 - protein, 109 aa, Artificial Sequence
  Synthetic
QTVVTQEPSLTVSPGGTVTLTCGSSTGAVTSGYYPNWIQQKPGQAPRGLIGGTKFLAPGTPARFSGSLLGGKAALTLSGVQPEDEAEYYCALWYSNRWVFGGGTKLTVL

SEQ ID NO: 470 - protein, 125 aa, Artificial Sequence; identical to SEQ ID NO: 466
  Synthetic

SEQ ID NO: 471 - protein, 109 aa, Artificial Sequence
  Synthetic
QTVVTQEPSLTVSPGGTVTLTCGSSTGAVTSGYYPNWLQQKPGQAPRGLIGGTKFLAPGTPARFSGSLLGGKAALTLSGVQPEDEAEYYCALWYSNRWVFGGGTKLTVL

SEQ ID NO: 472 - protein, 5 aa, Artificial Sequence
  Synthetic
KYAIN

SEQ ID NO: 473 - protein, 19 aa, Artificial Sequence
  Synthetic
RIRSKYNNYATYYADAVKS

SEQ ID NO: 474 - protein, 14 aa, Artificial Sequence
  Synthetic
AGNFGSSYTSYYAY

SEQ ID NO: 475 - protein, 14 aa, Artificial Sequence
  Synthetic
GSSTGAVTSGYYPN

SEQ ID NO: 476 - protein, 7 aa, Artificial Sequence
  Synthetic
GTKFLAP

SEQ ID NO: 477 - protein, 9 aa, Artificial Sequence
  Synthetic
ALWYSNRWV

SEQ ID NO: 478 - protein, 125 aa, Artificial Sequence
  Synthetic
EVQLVESGGGLVQPGGSLKLSCAASGFTFNKYAINWVRQAPGKGLEWVARIRSKYNNYATYYADAVKSRFTISRDDSKNTVYLQMNNLKTEDTAVYYCARAGNFGSSYTSYYAYWGQGTLVTVSS

SEQ ID NO: 479 - protein, 109 aa, Artificial Sequence
  Synthetic
QTVVTQEPSLTVSPGGTVTITCGSSTGAVTSGYYPNWVQKKPGQAPRGLIGGTKFLAPGTPARFSGSLSGGKAALTLSGVQPEDEAEYYCALWYSNRWVFGSGTKLTVL

SEQ ID NO: 480 - protein, 5 aa, Artificial Sequence
  Synthetic
KYAMN

SEQ ID NO: 481 - protein, 19 aa, Artificial Sequence
  Synthetic
RIRSKYNNYATYYAEAVKG

SEQ ID NO: 482 - protein, 14 aa, Artificial Sequence
  Synthetic
NENIGTSYTSYYAY

SEQ ID NO: 483 - protein, 14 aa, Artificial Sequence
  Synthetic
GSSTGAVTSGYYPN

SEQ ID NO: 484 - protein, 7 aa, Artificial Sequence
  Synthetic
GTKFLAP

SEQ ID NO: 485 - protein, 9 aa, Artificial Sequence
  Synthetic
ALWYSNRWV

SEQ ID NO: 486 - protein, 125 aa, Artificial Sequence
  Synthetic
EVQLVESGGGLVQPGGSLKLSCAASGFTFNKYAMNWVRQAPGKGLEWVARIRSKYNNYATYYAEAVKGRFTISRDDSKNTVYLQMNNLKTEDTAVYYCVRNENIGTSYTSYYAYWGQGTLVTVSS

SEQ ID NO: 487 - protein, 109 aa, Artificial Sequence
  Synthetic
QTVVTQEPSLTVSPGGTVTITCGSSTGAVTSGYYPNWVQQKPGQAPRGLIGGTKFLAPGTPARFSGSLSGGKAALTLSGVQPEDEAEYYCALWYSNRWVFGSGTKLTVL

SEQ ID NO: 488 - protein, 5 aa, Artificial Sequence
  Synthetic
KYAMN

SEQ ID NO: 489 - protein, 19 aa, Artificial Sequence
  Synthetic
RIRSKYNNYATYYADAVKS

SEQ ID NO: 490 - protein, 14 aa, Artificial Sequence
  Synthetic
AGNFGSSYTSYFAY

SEQ ID NO: 491 - protein, 14 aa, Artificial Sequence
  Synthetic
GSSTGAVTSGYYPN

SEQ ID NO: 492 - protein, 7 aa, Artificial Sequence
  Synthetic
GTKFLAP

SEQ ID NO: 493 - protein, 9 aa, Artificial Sequence
  Synthetic
ALYYSNRWV

SEQ ID NO: 494 - protein, 125 aa, Artificial Sequence
  Synthetic
EVQLVESGGGLVQPGGSLKLSCAASGFTFNKYAMNWVRQAPGKGMEWVARIRSKYNNYATYYADAVKSRFTISRDDSKNTLYLQMNNLKTEDTAVYYCVRAGNFGSSYTSYFAYWGQGTLVTVSS

SEQ ID NO: 495 - protein, 109 aa, Artificial Sequence
  Synthetic
QTVVTQEPSLTVSPGGTVTITCGSSTGAVTSGYYPNWIQKKPGQAPRGLIGGTKFLAPGTPARFSGSLEGGKAALTLSGVQPEDEAEYYCALYYSNRWVFGSGTKLTVL

SEQ ID NO: 496 - protein, 5 aa, Artificial Sequence
  Synthetic
KYAMN

SEQ ID NO: 497 - protein, 19 aa, Artificial Sequence
  Synthetic
RIRSKYNNYATYYADAVKS

SEQ ID NO: 498 - protein, 14 aa, Artificial Sequence
  Synthetic
AGNFGTSYTSYYAY

SEQ ID NO: 499 - protein, 14 aa, Artificial Sequence
  Synthetic
GSSTGAVTSGYYPN

SEQ ID NO: 500 - protein, 7 aa, Artificial Sequence
  Synthetic
GTKFLAP

SEQ ID NO: 501 - protein, 9 aa, Artificial Sequence
  Synthetic
ALWYSNRWV

SEQ ID NO: 502 - protein, 125 aa, Artificial Sequence
  Synthetic
EVQLVESGGGLVQPGGSLKLSCAASGFTFNKYAMNWVRQAPGKGMEWVARIRSKYNNYATYYADAVKSRFTISRDDSKNTLYLQMNNLKTEDTAVYYCVRAGNFGTSYTSYYAYWGQGTLVTVSS

SEQ ID NO: 503 - protein, 109 aa, Artificial Sequence; identical to SEQ ID NO: 479
  Synthetic

SEQ ID NO: 504 - protein, 5 aa, Artificial Sequence
  Synthetic
KYAIN

SEQ ID NO: 505 - protein, 19 aa, Artificial Sequence
  Synthetic
RIRSKYNNYATYYADAVKS

SEQ ID NO: 506 - protein, 14 aa, Artificial Sequence
  Synthetic
NANFGTSYTSYFAY

SEQ ID NO: 507 - protein, 14 aa, Artificial Sequence
  Synthetic
GSSTGAVTSGYYPN

SEQ ID NO: 508 - protein, 7 aa, Artificial Sequence
  Synthetic
GTKFLAP

SEQ ID NO: 509 - protein, 9 aa, Artificial Sequence
  Synthetic
ALWYSNRWV

SEQ ID NO: 510 - protein, 125 aa, Artificial Sequence
  Synthetic
EVQLVESGGGLVQPGGSLKLSCAASGFTFNKYAINWVREAPGKGLEWVARIRSKYNNYATYYADAVKSRFTISRDDSKNTAYLQMNNLKTEDTAVYYCVRNANFGTSYTSYFAYWGQGTLVTVSS

SEQ ID NO: 511 - protein, 109 aa, Artificial Sequence; identical to SEQ ID NO: 379
  Synthetic

SEQ ID NO: 512 - protein, 125 aa, Artificial Sequence; identical to SEQ ID NO: 362
  Synthetic

SEQ ID NO: 513 - protein, 109 aa, Artificial Sequence
  Synthetic
QTVVTQEPSLTVSPGGTVTLTCGSSTGAVTSGYYPNWVQQKPGQAPRGLIGGTKFLAPGTPARFSGSLLGGKAALTLSGVQPEDEAEYYCALWYSNRWVFGSGTKLTVL

SEQ ID NO: 514 - protein, 125 aa, Artificial Sequence; identical to SEQ ID NO: 362
  Synthetic

SEQ ID NO: 515 - protein, 109 aa, Artificial Sequence
  Synthetic
QTVVTQEPSLTVSPGGTVTITCGSSTGAVTSGYYPNWVQQKPGQAPRGLIGGTKFLAPGTPARFSGSLLGGKAALTLSGVQPEDEAEYYCALWYSNRWVFGSGTKLTVL

SEQ ID NO: 516 - protein, 125 aa, Artificial Sequence; identical to SEQ ID NO: 362
  Synthetic

SEQ ID NO: 517 - protein, 109 aa, Artificial Sequence
  Synthetic
QTVVTQEPSLTVSPGGTVTLTCGSSTGAVTSGYYPNWVQQKPGQAPRGLIGGTKFLAPGTPARFSGSLEGGKAALTLSGVQPEDEAEYYCALWYSNRWVFGGGTKLTVL

SEQ ID NO: 518 - protein, 125 aa, Artificial Sequence; identical to SEQ ID NO: 362
  Synthetic

SEQ ID NO: 519 - protein, 109 aa, Artificial Sequence
  Synthetic
QTVVTQEPSLTVSPGGTVTLTCGSSTGAVTSGYYPNWVQQKPGQAPRGLIGGTKFLAPGTPARFSGSLSGGKAALTLSGVQPEDEAEYYCALWYSNRWVFGGGTKLTVL

SEQ ID NO: 520 - protein, 125 aa, Artificial Sequence; identical to SEQ ID NO: 362
  Synthetic

SEQ ID NO: 521 - protein, 109 aa, Artificial Sequence
  Synthetic
QTVVTQEPSLTVSPGGTVTLTCGSSTGAVTSGYYPNWVQEKPGQAPRGLIGGTKFLAPGTPARFSGSLLGGKAALTLSGVQPEDEAEYYCALWYSNRWVFGGGTKLTVL

SEQ ID NO: 522 - protein, 125 aa, Artificial Sequence; identical to SEQ ID NO: 362
  Synthetic

SEQ ID NO: 523 - protein, 109 aa, Artificial Sequence; identical to SEQ ID NO: 377
  Synthetic

SEQ ID NO: 524 - protein, 5 aa, Artificial Sequence
  Synthetic
KYAMN

SEQ ID NO: 525 - protein, 19 aa, Artificial Sequence
  Synthetic
RIRSKYNNYATYYADSVKS

SEQ ID NO: 526 - protein, 14 aa, Artificial Sequence
  Synthetic
HGNFGNSYTSYYAY

SEQ ID NO: 527 - protein, 14 aa, Artificial Sequence
  Synthetic
GSSTGAVTSGYYPN

SEQ ID NO: 528 - protein, 7 aa, Artificial Sequence
  Synthetic
GTKFLAP

SEQ ID NO: 529 - protein, 9 aa, Artificial Sequence
  Synthetic
LLWYSNRWV

SEQ ID NO: 530 - protein, 125 aa, Artificial Sequence; identical to SEQ ID NO: 362
  Synthetic

SEQ ID NO: 531 - protein, 109 aa, Artificial Sequence
  Synthetic
QTVVTQEPSLTVSPGGTVTLTCGSSTGAVTSGYYPNWVQQKPGQAPRGLIGGTKFLAPGTPARFSGSLLGGKAALTLSGVQPEDEAEYYCLLWYSNRWVFGGGTKLTVL

SEQ ID NO: 532 - protein, 125 aa, Artificial Sequence; identical to SEQ ID NO: 362
  Synthetic

SEQ ID NO: 533 - protein, 109 aa, Artificial Sequence; identical to SEQ ID NO: 469
  Synthetic

SEQ ID NO: 534 - protein, 125 aa, Artificial Sequence; identical to SEQ ID NO: 362
  Synthetic

SEQ ID NO: 535 - protein, 109 aa, Artificial Sequence; identical to SEQ ID NO: 471
  Synthetic

SEQ ID NO: 536 - protein, 125 aa, Artificial Sequence; identical to SEQ ID NO: 362
  Synthetic

SEQ ID NO: 537 - protein, 109 aa, Artificial Sequence
  Synthetic
QTVVTQEPSLTVSPGGTVTLTCGSSTGAVTSGYYPNWMQQKPGQAPRGLIGGTKFLAPGTPARFSGSLLGGKAALTLSGVQPEDEAEYYCALWYSNRWVFGGGTKLTVL

SEQ ID NO: 538 - protein, 5 aa, Artificial Sequence
  Synthetic
KYAMN

SEQ ID NO: 539 - protein, 19 aa, Artificial Sequence
  Synthetic
RIRSKYNNYATYYADSVKS

SEQ ID NO: 540 - protein, 14 aa, Artificial Sequence
  Synthetic
HGNFGNSYTSYYAY

SEQ ID NO: 541 - protein, 14 aa, Artificial Sequence
  Synthetic
GSSTGAVTSGYYPN

SEQ ID NO: 542 - protein, 7 aa, Artificial Sequence
  Synthetic
GTKFLAP

SEQ ID NO: 543 - protein, 9 aa, Artificial Sequence
  Synthetic
ALYYSNRWV

SEQ ID NO: 544 - protein, 125 aa, Artificial Sequence; identical to SEQ ID NO: 362
  Synthetic

SEQ ID NO: 545 - protein, 109 aa, Artificial Sequence
  Synthetic
QTVVTQEPSLTVSPGGTVTLTCGSSTGAVTSGYYPNWVQQKPGQAPRGLIGGTKFLAPGTPARFSGSLLGGKAALTLSGVQPEDEAEYYCALYYSNRWVFGGGTKLTVL

SEQ ID NO: 546 - protein, 5 aa, Artificial Sequence
  Synthetic
GYAMN

SEQ ID NO: 547 - protein, 19 aa, Artificial Sequence
  Synthetic
RIRSKYNNYATYYADSVKE

SEQ ID NO: 548 - protein, 14 aa, Artificial Sequence
  Synthetic
HRNFGNSYLSWFAY

SEQ ID NO: 549 - protein, 14 aa, Artificial Sequence
  Synthetic
RSSTGAVTSGYYPN

SEQ ID NO: 550 - protein, 7 aa, Artificial Sequence
  Synthetic
ATDMRPS

SEQ ID NO: 551 - protein, 9 aa, Artificial Sequence
  Synthetic
ALWYSNRWV

SEQ ID NO: 552 - protein, 125 aa, Artificial Sequence
  Synthetic
EVQLVESGGGLVQPGGSLKLSCAASGFTFNGYAMNWVRQAPGKGLEWVARIRSKYNNYATYYADSVKERFTISRDDSKNTAYLQMNNLKTEDTAVYYCVRHRNFGNSYLSWFAYWGQGTLVTVSS

SEQ ID NO: 553 - protein, 109 aa, Artificial Sequence; identical to SEQ ID NO: 173
  Synthetic

SEQ ID NO: 554 - protein, 125 aa, Artificial Sequence
  Synthetic
EVQLVESGGGLVQPGGSLKLSCAASGFTFNGYAMNWVRQAPGKGLEWVARIRSKYNNYATYYADSVKERFTISRDDSKNTIYLQMNNLKTEDTAVYYCVRHRNFGNSYLSWFAYWGQGTLVTVSS

SEQ ID NO: 555 - protein, 109 aa, Artificial Sequence; identical to SEQ ID NO: 173
  Synthetic

SEQ ID NO: 556 - protein, 125 aa, Artificial Sequence
  Synthetic
EVQLVESGGGLVQPGGSLKLSCAASGFTFNGYAMNWVRQAPGKGLEWVARIRSKYNNYATYYADSVKERFTISRDDSKNTLYLQMNNLKTEDTAVYYCVRHRNFGNSYLSWFAYWGQGTLVTVSS

SEQ ID NO: 557 - protein, 109 aa, Artificial Sequence; identical to SEQ ID NO: 173
  Synthetic

SEQ ID NO: 558 - protein, 125 aa, Artificial Sequence
  Synthetic
EVQLVESGGGLVQPGGSLKLSCAASGFTFNGYAMNWVRQAPGKGLEWVARIRSKYNNYATYYADSVKERFTISRDDSKNTTYLQMNNLKTEDTAVYYCVRHRNFGNSYLSWFAYWGQGTLVTVSS

SEQ ID NO: 559 - protein, 109 aa, Artificial Sequence; identical to SEQ ID NO: 173
  Synthetic

SEQ ID NO: 560 - protein, 125 aa, Artificial Sequence
  Synthetic
EVQLVESGGGLVQPGGSLKLSCAASGFTFNGYAMNWVRQAPGKGLEWVARIRSKYNNYATYYADSVKERFTISRDDSKNTVYLQMNNLKTEDTAVYYCVRHRNFGNSYLSWFAYWGQGTLVTVSS

SEQ ID NO: 561 - protein, 109 aa, Artificial Sequence; identical to SEQ ID NO: 173
  Synthetic

SEQ ID NO: 562 - protein, 125 aa, Artificial Sequence
  Synthetic
EVQLVESGGGLVQPGGSLKLSCAASGFTFNGYAMNWVRQAPGKGMEWVARIRSKYNNYATYYADSVKERFTISRDDSKNTAYLQMNNLKTEDTAVYYCVRHRNFGNSYLSWFAYWGQGTLVTVSS

SEQ ID NO: 563 - protein, 109 aa, Artificial Sequence; identical to SEQ ID NO: 173
  Synthetic

SEQ ID NO: 564 - protein, 125 aa, Artificial Sequence; identical to SEQ ID NO: 562
  Synthetic

SEQ ID NO: 565 - protein, 109 aa, Artificial Sequence; identical to SEQ ID NO: 185
  Synthetic

SEQ ID NO: 566 - protein, 125 aa, Artificial Sequence; identical to SEQ ID NO: 562
  Synthetic

SEQ ID NO: 567 - protein, 109 aa, Artificial Sequence; identical to SEQ ID NO: 187
  Synthetic

SEQ ID NO: 568 - protein, 125 aa, Artificial Sequence; identical to SEQ ID NO: 562
  Synthetic

SEQ ID NO: 569 - protein, 109 aa, Artificial Sequence; identical to SEQ ID NO: 189
  Synthetic

SEQ ID NO: 570 - protein, 125 aa, Artificial Sequence
  Synthetic
EVQLVESGGGLVQPGGSLKLSCAASGFTFNGYAMNWVRQAPGKGVEWVARIRSKYNNYATYYADSVKERFTISRDDSKNTAYLQMNNLKTEDTAVYYCVRHRNFGNSYLSWFAYWGQGTLVTVSS

SEQ ID NO: 571 - protein, 109 aa, Artificial Sequence; identical to SEQ ID NO: 173
  Synthetic

SEQ ID NO: 572 - protein, 125 aa, Artificial Sequence; identical to SEQ ID NO: 570
  Synthetic

SEQ ID NO: 573 - protein, 109 aa, Artificial Sequence; identical to SEQ ID NO: 193
  Synthetic

SEQ ID NO: 574 - protein, 125 aa, Artificial Sequence; identical to SEQ ID NO: 570
  Synthetic

SEQ ID NO: 575 - protein, 109 aa, Artificial Sequence; identical to SEQ ID NO: 195
  Synthetic

SEQ ID NO: 576 - protein, 5 aa, Artificial Sequence
  Synthetic
GYAFN

SEQ ID NO: 577 - protein, 19 aa, Artificial Sequence
  Synthetic
RIRSKYNNYATYYADSVKE

SEQ ID NO: 578 - protein, 14 aa, Artificial Sequence
  Synthetic
HRNFGNSYLSWFAY

SEQ ID NO: 579 - protein, 14 aa, Artificial Sequence
  Synthetic
RSSTGAVTSGYYPN

SEQ ID NO: 580 - protein, 7 aa, Artificial Sequence
  Synthetic
ATDMRPS

SEQ ID NO: 581 - protein, 9 aa, Artificial Sequence
  Synthetic
ALWYSNRWV

SEQ ID NO: 582 - protein, 125 aa, Artificial Sequence
  Synthetic
EVQLVESGGGLVQPGGSLKLSCAASGFTFNGYAFNWVRQAPGKGLEWVARIRSKYNNYATYYADSVKERFTISRDDSKNTVYLQMNNLKTEDTAVYYCVRHRNFGNSYLSWFAYWGQGTLVTVSS

SEQ ID NO: 583 - protein, 109 aa, Artificial Sequence; identical to SEQ ID NO: 173
  Synthetic

SEQ ID NO: 584 - protein, 5 aa, Artificial Sequence
  Synthetic
GYAIN

SEQ ID NO: 585 - protein, 19 aa, Artificial Sequence
  Synthetic
RIRSKYNNYATYYADSVKE

SEQ ID NO: 586 - protein, 14 aa, Artificial Sequence
  Synthetic
HRNFGNSYLSWFAY

SEQ ID NO: 587 - protein, 14 aa, Artificial Sequence
  Synthetic
RSSTGAVTSGYYPN

SEQ ID NO: 588 - protein, 7 aa, Artificial Sequence
  Synthetic
ATDMRPS

SEQ ID NO: 589 - protein, 9 aa, Artificial Sequence
  Synthetic
ALWYSNRWV

SEQ ID NO: 590 - protein, 125 aa, Artificial Sequence
  Synthetic
EVQLVESGGGLVQPGGSLKLSCAASGFTFNGYAINWVRQAPGKGLEWVARIRSKYNNYATYYADSVKERFTISRDDSKNTAYLQMNNLKTEDTAVYYCVRHRNFGNSYLSWFAYWGQGTLVTVSS

SEQ ID NO: 591 - protein, 109 aa, Artificial Sequence; identical to SEQ ID NO: 173
  Synthetic

SEQ ID NO: 592 - protein, 125 aa, Artificial Sequence
  Synthetic
EVQLVESGGGLVQPGGSLKLSCAASGFTFNGYAINWVRQAPGKGLEWVARIRSKYNNYATYYADSVKERFTISRDDSKNTLYLQMNNLKTEDTAVYYCVRHRNFGNSYLSWFAYWGQGTLVTVSS

SEQ ID NO: 593 - protein, 109 aa, Artificial Sequence; identical to SEQ ID NO: 173
  Synthetic

SEQ ID NO: 594 - protein, 125 aa, Artificial Sequence
  Synthetic
EVQLVESGGGLVQPGGSLKLSCAASGFTFNGYAINWVRQAPGKGLEWVARIRSKYNNYATYYADSVKERFTISRDDSKNTVYLQMNNLKTEDTAVYYCVRHRNFGNSYLSWFAYWGQGTLVTVSS

SEQ ID NO: 595 - protein, 109 aa, Artificial Sequence; identical to SEQ ID NO: 173
  Synthetic

SEQ ID NO: 596 - protein, 125 aa, Artificial Sequence; identical to SEQ ID NO: 594
  Synthetic

SEQ ID NO: 597 - protein, 109 aa, Artificial Sequence; identical to SEQ ID NO: 185
  Synthetic

SEQ ID NO: 598 - protein, 125 aa, Artificial Sequence; identical to SEQ ID NO: 594
  Synthetic

SEQ ID NO: 599 - protein, 109 aa, Artificial Sequence; identical to SEQ ID NO: 187
  Synthetic

SEQ ID NO: 600 - protein, 125 aa, Artificial Sequence
  Synthetic
EVQLVESGGGLVQPGGSLKLSCAASGFTFNGYAINWVRQAPGKGVEWVARIRSKYNNYATYYADSVKERFTISRDDSKNTVYLQMNNLKTEDTAVYYCVRHRNFGNSYLSWFAYWGQGTLVTVSS

SEQ ID NO: 601 - protein, 109 aa, Artificial Sequence; identical to SEQ ID NO: 221
  Synthetic

SEQ ID NO: 602 - protein, 125 aa, Artificial Sequence; identical to SEQ ID NO: 590
  Synthetic

SEQ ID NO: 603 - protein, 109 aa, Artificial Sequence; identical to SEQ ID NO: 185
  Synthetic

SEQ ID NO: 604 - protein, 125 aa, Artificial Sequence
  Synthetic
EVQLVESGGGLVQPGGSLKLSCAASGFTFNGYAINWVREAPGKGLEWVARIRSKYNNYATYYADSVKERFTISRDDSKNTVYLQMNNLKTEDTAVYYCVRHRNFGNSYLSWFAYWGQGTLVTVSS

SEQ ID NO: 605 - protein, 109 aa, Artificial Sequence; identical to SEQ ID NO: 185
  Synthetic

SEQ ID NO: 606 - protein, 5 aa, Artificial Sequence
  Synthetic
GYAVN

SEQ ID NO: 607 - protein, 19 aa, Artificial Sequence
  Synthetic
RIRSKYNNYATYYADSVKE

SEQ ID NO: 608 - protein, 14 aa, Artificial Sequence
  Synthetic
HRNFGNSYLSWFAY

SEQ ID NO: 609 - protein, 14 aa, Artificial Sequence
  Synthetic
RSSTGAVTSGYYPN

SEQ ID NO: 610 - protein, 7 aa, Artificial Sequence
  Synthetic
ATDMRPS

SEQ ID NO: 611 - protein, 9 aa, Artificial Sequence
  Synthetic
ALWYSNRWV

SEQ ID NO: 612 - protein, 125 aa, Artificial Sequence
  Synthetic
EVQLVESGGGLVQPGGSLKLSCAASGFTFNGYAVNWVRQAPGKGLEWVARIRSKYNNYATYYADSVKERFTISRDDSKNTAYLQMNNLKTEDTAVYYCVRHRNFGNSYLSWFAYWGQGTLVTVSS

SEQ ID NO: 613 - protein, 109 aa, Artificial Sequence; identical to SEQ ID NO: 173
  Synthetic

SEQ ID NO: 614 - protein, 125 aa, Artificial Sequence
  Synthetic
EVQLVESGGGLVQPGGSLKLSCAASGFTFNGYAMNWVRDAPGKGLEWVARIRSKYNNYATYYADSVKERFTISRDDSKNTAYLQMNNLKTEDTAVYYCVRHRNFGNSYLSWFAYWGQGTLVTVSS

SEQ ID NO: 615 - protein, 109 aa, Artificial Sequence; identical to SEQ ID NO: 173
  Synthetic

SEQ ID NO: 616 - protein, 125 aa, Artificial Sequence; identical to SEQ ID NO: 614
  Synthetic

SEQ ID NO: 617 - protein, 109 aa, Artificial Sequence; identical to SEQ ID NO: 185
  Synthetic

SEQ ID NO: 618 - protein, 125 aa, Artificial Sequence; identical to SEQ ID NO: 614
  Synthetic

SEQ ID NO: 619 - protein, 109 aa, Artificial Sequence; identical to SEQ ID NO: 239
  Synthetic

SEQ ID NO: 620 - protein, 125 aa, Artificial Sequence; identical to SEQ ID NO: 614
  Synthetic

SEQ ID NO: 621 - protein, 109 aa, Artificial Sequence; identical to SEQ ID NO: 187
  Synthetic

SEQ ID NO: 622 - protein, 125 aa, Artificial Sequence; identical to SEQ ID NO: 614
  Synthetic

SEQ ID NO: 623 - protein, 109 aa, Artificial Sequence; identical to SEQ ID NO: 189
  Synthetic

SEQ ID NO: 624 - protein, 125 aa, Artificial Sequence; identical to SEQ ID NO: 614
  Synthetic

SEQ ID NO: 625 - protein, 109 aa, Artificial Sequence; identical to SEQ ID NO: 245
  Synthetic

SEQ ID NO: 626 - protein, 125 aa, Artificial Sequence; identical to SEQ ID NO: 614
  Synthetic

SEQ ID NO: 627 - protein, 109 aa, Artificial Sequence; identical to SEQ ID NO: 247
  Synthetic

SEQ ID NO: 628 - protein, 125 aa, Artificial Sequence
  Synthetic
EVQLVESGGGLVQPGGSLKLSCAASGFTFNGYAMNWVREAPGKGLEWVARIRSKYNNYATYYADSVKERFTISRDDSKNTAYLQMNNLKTEDTAVYYCVRHRNFGNSYLSWFAYWGQGTLVTVSS

SEQ ID NO: 629 - protein, 109 aa, Artificial Sequence; identical to SEQ ID NO: 173
  Synthetic

SEQ ID NO: 630 - protein, 125 aa, Artificial Sequence; identical to SEQ ID NO: 628
  Synthetic

SEQ ID NO: 631 - protein, 109 aa, Artificial Sequence; identical to SEQ ID NO: 185
  Synthetic

SEQ ID NO: 632 - protein, 125 aa, Artificial Sequence; identical to SEQ ID NO: 628
  Synthetic

SEQ ID NO: 633 - protein, 109 aa, Artificial Sequence; identical to SEQ ID NO: 239
  Synthetic

SEQ ID NO: 634 - protein, 125 aa, Artificial Sequence; identical to SEQ ID NO: 628
  Synthetic

SEQ ID NO: 635 - protein, 109 aa, Artificial Sequence; identical to SEQ ID NO: 187
  Synthetic

SEQ ID NO: 636 - protein, 125 aa, Artificial Sequence; identical to SEQ ID NO: 628
  Synthetic

SEQ ID NO: 637 - protein, 109 aa, Artificial Sequence; identical to SEQ ID NO: 189
  Synthetic

SEQ ID NO: 638 - protein, 125 aa, Artificial Sequence; identical to SEQ ID NO: 628
  Synthetic

SEQ ID NO: 639 - protein, 109 aa, Artificial Sequence; identical to SEQ ID NO: 245
  Synthetic

SEQ ID NO: 640 - protein, 125 aa, Artificial Sequence; identical to SEQ ID NO: 628
  Synthetic

SEQ ID NO: 641 - protein, 109 aa, Artificial Sequence; identical to SEQ ID NO: 247
  Synthetic

SEQ ID NO: 642 - protein, 125 aa, Artificial Sequence
  Synthetic
EVQLVESGGGLVQPGGSLKLSCAASGFTFNGYAMNWVRKAPGKGLEWVARIRSKYNNYATYYADSVKERFTISRDDSKNTAYLQMNNLKTEDTAVYYCVRHRNFGNSYLSWFAYWGQGTLVTVSS

SEQ ID NO: 643 - protein, 109 aa, Artificial Sequence; identical to SEQ ID NO: 173
  Synthetic

SEQ ID NO: 644 - protein, 125 aa, Artificial Sequence
  Synthetic
EVQLVESGGGLVQPGGSLKLSCAASGFTFNGYAMNWVRRAPGKGLEWVARIRSKYNNYATYYADSVKERFTISRDDSKNTAYLQMNNLKTEDTAVYYCVRHRNFGNSYLSWFAYWGQGTLVTVSS

SEQ ID NO: 645 - protein, 109 aa, Artificial Sequence; identical to SEQ ID NO: 173
  Synthetic

SEQ ID NO: 646 - protein, 125 aa, Artificial Sequence
  Synthetic
EVQLVESGGGLVQPGGSLKLSCAASGFTFNGYAMNWVRQAPGKGLEWVARIRSKYNNYATYYADSVKERFTISRDDSKNTAYLQMNNLKTEDTAVYYCARHRNFGNSYLSWFAYWGQGTLVTVSS

SEQ ID NO: 647 - protein, 109 aa, Artificial Sequence; identical to SEQ ID NO: 173
  Synthetic

SEQ ID NO: 648 - protein, 125 aa, Artificial Sequence
  Synthetic
EVQLVESGGGLVQPGGSLKLSCAASGFTFNGYAMNWVRQAPGKGLEWVARIRSKYNNYATYYADSVKERFTISRDDSKNTAYLQMNNLKTEDTAVYYCLRHRNFGNSYLSWFAYWGQGTLVTVSS

SEQ ID NO: 649 - protein, 109 aa, Artificial Sequence; identical to SEQ ID NO: 173
  Synthetic

SEQ ID NO: 650 - protein, 5 aa, Artificial Sequence
  Synthetic
GYAIN

SEQ ID NO: 651 - protein, 19 aa, Artificial Sequence
  Synthetic
RIRSKYNNYATYYADAVKE

SEQ ID NO: 652 - protein, 14 aa, Artificial Sequence
  Synthetic
ARNFGSSYLSWFAY

SEQ ID NO: 653 - protein, 14 aa, Artificial Sequence
  Synthetic
RSSTGAVTSGYYPN

SEQ ID NO: 654 - protein, 7 aa, Artificial Sequence
  Synthetic
ATDMRPS

SEQ ID NO: 655 - protein, 9 aa, Artificial Sequence
  Synthetic
ALWYSNRWV

SEQ ID NO: 656 - protein, 125 aa, Artificial Sequence
  Synthetic
EVQLVESGGGLVQPGGSLKLSCAASGFTFNGYAINWVRQAPGKGLEWVARIRSKYNNYATYYADAVKERFTISRDDSKNTVYLQMNNLKTEDTAVYYCARARNFGSSYLSWFAYWGQGTLVTVSS

SEQ ID NO: 657 - protein, 109 aa, Artificial Sequence; identical to SEQ ID NO: 289
  Synthetic

SEQ ID NO: 658 - protein, 5 aa, Artificial Sequence
  Synthetic
GYAMN

SEQ ID NO: 659 - protein, 19 aa, Artificial Sequence
  Synthetic
RIRSKYNNYATYYAEAVKG

SEQ ID NO: 660 - protein, 14 aa, Artificial Sequence
  Synthetic
NENIGTSYLSWFAY

SEQ ID NO: 661 - protein, 14 aa, Artificial Sequence
  Synthetic
RSSTGAVTSGYYPN

SEQ ID NO: 662 - protein, 7 aa, Artificial Sequence
  Synthetic
ATDMRPS

SEQ ID NO: 663 - protein, 9 aa, Artificial Sequence
  Synthetic
ALWYSNRWV

SEQ ID NO: 664 - protein, 125 aa, Artificial Sequence
  Synthetic
EVQLVESGGGLVQPGGSLKLSCAASGFTFNGYAMNWVRQAPGKGLEWVARIRSKYNNYATYYAEAVKGRFTISRDDSKNTVYLQMNNLKTEDTAVYYCVRNENIGTSYLSWFAYWGQGTLVTVSS

SEQ ID NO: 665 - protein, 109 aa, Artificial Sequence; identical to SEQ ID NO: 297
  Synthetic

SEQ ID NO: 666 - protein, 5 aa, Artificial Sequence
  Synthetic
GYAMN

SEQ ID NO: 667 - protein, 19 aa, Artificial Sequence
  Synthetic
RIRSKYNNYATYYAEAVKE

SEQ ID NO: 668 - protein, 14 aa, Artificial Sequence
  Synthetic
ARNFGSSYLSWFAY

SEQ ID NO: 669 - protein, 14 aa, Artificial Sequence
  Synthetic
RSSTGAVTSGYYPN

SEQ ID NO: 670 - protein, 7 aa, Artificial Sequence
  Synthetic
ATDMRPS

SEQ ID NO: 671 - protein, 9 aa, Artificial Sequence
  Synthetic
ALYYSNRWV

SEQ ID NO: 672 - protein, 125 aa, Artificial Sequence
  Synthetic
EVQLVESGGGLVQPGGSLKLSCAASGFTFNGYAMNWVRQAPGKGMEWVARIRSKYNNYATYYADAVKERFTISRDDSKNTLYLQMNNLKTEDTAVYYCVRARNFGSSYLSWFAYWGQGTLVTVSS

SEQ ID NO: 673 - protein, 109 aa, Artificial Sequence; identical to SEQ ID NO: 305
  Synthetic

SEQ ID NO: 674 - protein, 5 aa, Artificial Sequence
  Synthetic
GYAMN

SEQ ID NO: 675 - protein, 19 aa, Artificial Sequence
  Synthetic
RIRSKYNNYATYYADAVKE

SEQ ID NO: 676 - protein, 14 aa, Artificial Sequence
  Synthetic
ARNFGTSYLSWFAY

SEQ ID NO: 677 - protein, 14 aa, Artificial Sequence
  Synthetic
RSSTGAVTSGYYPN

SEQ ID NO: 678 - protein, 7 aa, Artificial Sequence
  Synthetic
ATDMRPS

SEQ ID NO: 679 - protein, 9 aa, Artificial Sequence
  Synthetic
ALWYSNRWV

SEQ ID NO: 680 - protein, 125 aa, Artificial Sequence
  Synthetic
EVQLVESGGGLVQPGGSLKLSCAASGFTFNGYAMNWVRQAPGKGMEWVARIRSKYNNYATYYADAVKERFTISRDDSKNTLYLQMNNLKTEDTAVYYCVRARNFGTSYLSWFAYWGQGTLVTVSS

SEQ ID NO: 681 - protein, 109 aa, Artificial Sequence; identical to SEQ ID NO: 289
  Synthetic

SEQ ID NO: 682 - protein, 5 aa, Artificial Sequence
  Synthetic
GYAIN

SEQ ID NO: 683 - protein, 19 aa, Artificial Sequence
  Synthetic
RIRSKYNNYATYYADAVKE

SEQ ID NO: 684 - protein, 14 aa, Artificial Sequence
  Synthetic
NANFGTSYLSFFAY

SEQ ID NO: 685 - protein, 14 aa, Artificial Sequence
  Synthetic
RSSTGAVTSGYYPN

SEQ ID NO: 686 - protein, 7 aa, Artificial Sequence
  Synthetic
ATDMRPS

SEQ ID NO: 687 - protein, 9 aa, Artificial Sequence
  Synthetic
ALWYSNRWV

SEQ ID NO: 688 - protein, 125 aa, Artificial Sequence
  Synthetic
EVQLVESGGGLVQPGGSLKLSCAASGFTFNGYAINWVREAPGKGLEWVARIRSKYNNYATYYADAVKERFTISRDDSKNTAYLQMNNLKTEDTAVYYCVRNANFGTSYLSYFAYWGQGTLVTVSS

SEQ ID NO: 689 - protein, 109 aa, Artificial Sequence; identical to SEQ ID NO: 189
  Synthetic

SEQ ID NO: 690 - protein, 125 aa, Artificial Sequence; identical to SEQ ID NO: 552
  Synthetic

SEQ ID NO: 691 - protein, 109 aa, Artificial Sequence; identical to SEQ ID NO: 323
  Synthetic

SEQ ID NO: 692 - protein, 125 aa, Artificial Sequence; identical to SEQ ID NO: 552
  Synthetic

SEQ ID NO: 693 - protein, 109 aa, Artificial Sequence; identical to SEQ ID NO: 325
  Synthetic

SEQ ID NO: 694 - protein, 125 aa, Artificial Sequence; identical to SEQ ID NO: 552
  Synthetic

SEQ ID NO: 695 - protein, 109 aa, Artificial Sequence; identical to SEQ ID NO: 327
  Synthetic

SEQ ID NO: 696 - protein, 125 aa, Artificial Sequence; identical to SEQ ID NO: 552
  Synthetic

SEQ ID NO: 697 - protein, 109 aa, Artificial Sequence; identical to SEQ ID NO: 329
  Synthetic

SEQ ID NO: 698 - protein, 125 aa, Artificial Sequence; identical to SEQ ID NO: 552
  Synthetic

SEQ ID NO: 699 - protein, 109 aa, Artificial Sequence; identical to SEQ ID NO: 331
  Synthetic

SEQ ID NO: 700 - protein, 125 aa, Artificial Sequence; identical to SEQ ID NO: 552
  Synthetic

SEQ ID NO: 701 - protein, 109 aa, Artificial Sequence; identical to SEQ ID NO: 187
  Synthetic

SEQ ID NO: 702 - protein, 5 aa, Artificial Sequence
  Synthetic
GYAMN

SEQ ID NO: 703 - protein, 19 aa, Artificial Sequence
  Synthetic
RIRSKYNNYATYYADSVKE

SEQ ID NO: 704 - protein, 14 aa, Artificial Sequence
  Synthetic
HRNFGNSYLSWFAY

SEQ ID NO: 705 - protein, 14 aa, Artificial Sequence
  Synthetic
RSSTGAVTSGYYPN

SEQ ID NO: 706 - protein, 7 aa, Artificial Sequence
  Synthetic
ATDMRPS

SEQ ID NO: 707 - protein, 9 aa, Artificial Sequence
  Synthetic
LLWYSNRWV

SEQ ID NO: 708 - protein, 125 aa, Artificial Sequence; identical to SEQ ID NO: 552
  Synthetic

SEQ ID NO: 709 - protein, 109 aa, Artificial Sequence; identical to SEQ ID NO: 341
  Synthetic

SEQ ID NO: 710 - protein, 125 aa, Artificial Sequence; identical to SEQ ID NO: 552
  Synthetic

SEQ ID NO: 711 - protein, 109 aa, Artificial Sequence; identical to SEQ ID NO: 279
  Synthetic

SEQ ID NO: 712 - protein, 125 aa, Artificial Sequence; identical to SEQ ID NO: 552
  Synthetic

SEQ ID NO: 713 - protein, 109 aa, Artificial Sequence; identical to SEQ ID NO: 281
  Synthetic

SEQ ID NO: 714 - protein, 125 aa, Artificial Sequence; identical to SEQ ID NO: 552
  Synthetic

SEQ ID NO: 715 - protein, 109 aa, Artificial Sequence; identical to SEQ ID NO: 347
  Synthetic

SEQ ID NO: 716 - protein, 5 aa, Artificial Sequence
  Synthetic
GYAMN

SEQ ID NO: 717 - protein, 19 aa, Artificial Sequence
  Synthetic
RIRSKYNNYATYYADSVKE

SEQ ID NO: 718 - protein, 14 aa, Artificial Sequence
  Synthetic
HRNFGNSYLSWFAY

SEQ ID NO: 719 - protein, 14 aa, Artificial Sequence
  Synthetic
RSSTGAVTSGYYPN

SEQ ID NO: 720 - protein, 7 aa, Artificial Sequence
  Synthetic
ATDMRPS

SEQ ID NO: 721 - protein, 9 aa, Artificial Sequence
  Synthetic
ALYYSNRWV

SEQ ID NO: 722 - protein, 125 aa, Artificial Sequence; identical to SEQ ID NO: 552
  Synthetic

SEQ ID NO: 723 - protein, 109 aa, Artificial Sequence; identical to SEQ ID NO: 355
  Synthetic

SEQ ID NO: 724 - protein, 5 aa, Artificial Sequence
  Synthetic
SYAMN

SEQ ID NO: 725 - protein, 19 aa, Artificial Sequence
  Synthetic
RIRSKYNNYATYYADSVKG

SEQ ID NO: 726 - protein, 14 aa, Artificial Sequence
  Synthetic
HGNFGNSYVSWWAY

SEQ ID NO: 727 - protein, 14 aa, Artificial Sequence
  Synthetic
GSSTGAVTSGNYPN

SEQ ID NO: 728 - protein, 7 aa, Artificial Sequence
  Synthetic
GTKFLAP

SEQ ID NO: 729 - protein, 9 aa, Artificial Sequence
  Synthetic
VLWYSNRWV

SEQ ID NO: 730 - protein, 125 aa, Artificial Sequence
  Synthetic
EVQLVESGGGLVQPGGSLKLSCAASGFTFNSYAMNWVRQAPGKGLEWVARIRSKYNNYATYYADSVKGRFTISRDDSKNTAYLQMNNLKTEDTAVYYCVRHGNFGNSYVSWWAYWGQGTLVTVSS

SEQ ID NO: 731 - protein, 109 aa, Artificial Sequence
  Synthetic
QTVVTQEPSLTVSPGGTVTLTCGSSTGAVTSGNYPNWVQQKPGQAPRGLIGGTKFLAPGTPARFSGSLLGGKAALTLSGVQPEDEAEYYCVLWYSNRWVFGGGTKLTVL

SEQ ID NO: 732 - protein, 125 aa, Artificial Sequence
  Synthetic
EVQLVESGGGLVQPGGSLKLSCAASGFTFNSYAMNWVRQAPGKGLEWVARIRSKYNNYATYYADSVKGRFTISRDDSKNTIYLQMNNLKTEDTAVYYCVRHGNFGNSYVSWWAYWGQGTLVTVSS

SEQ ID NO: 733 - protein, 109 aa, Artificial Sequence; identical to SEQ ID NO: 731
  Synthetic

SEQ ID NO: 734 - protein, 125 aa, Artificial Sequence
  Synthetic
EVQLVESGGGLVQPGGSLKLSCAASGFTFNSYAMNWVRQAPGKGLEWVARIRSKYNNYATYYADSVKGRFTISRDDSKNTLYLQMNNLKTEDTAVYYCVRHGNFGNSYVSWWAYWGQGTLVTVSS

SEQ ID NO: 735 - protein, 109 aa, Artificial Sequence; identical to SEQ ID NO: 731
  Synthetic

SEQ ID NO: 736 - protein, 125 aa, Artificial Sequence
  Synthetic
EVQLVESGGGLVQPGGSLKLSCAASGFTFNSYAMNWVRQAPGKGLEWVARIRSKYNNYATYYADSVKGRFTISRDDSKNTTYLQMNNLKTEDTAVYYCVRHGNFGNSYVSWWAYWGQGTLVTVSS

SEQ ID NO: 737 - protein, 109 aa, Artificial Sequence; identical to SEQ ID NO: 731
  Synthetic

SEQ ID NO: 738 - protein, 125 aa, Artificial Sequence
  Synthetic
EVQLVESGGGLVQPGGSLKLSCAASGFTFNSYAMNWVRQAPGKGLEWVARIRSKYNNYATYYADSVKGRFTISRDDSKNTVYLQMNNLKTEDTAVYYCVRHGNFGNSYVSWWAYWGQGTLVTVSS

SEQ ID NO: 739 - protein, 109 aa, Artificial Sequence; identical to SEQ ID NO: 731
  Synthetic

SEQ ID NO: 740 - protein, 125 aa, Artificial Sequence
  Synthetic
EVQLVESGGGLVQPGGSLKLSCAASGFTFNSYAMNWVRQAPGKGMEWVARIRSKYNNYATYYADSVKGRFTISRDDSKNTAYLQMNNLKTEDTAVYYCVRHGNFGNSYVSWWAYWGQGTLVTVSS

SEQ ID NO: 741 - protein, 109 aa, Artificial Sequence; identical to SEQ ID NO: 731
  Synthetic

SEQ ID NO: 742 - protein, 125 aa, Artificial Sequence; identical to SEQ ID NO: 740
  Synthetic

SEQ ID NO: 743 - protein, 109 aa, Artificial Sequence
  Synthetic
QTVVTQEPSLTVSPGGTVTITCGSSTGAVTSGNYPNWVQKKPGQAPRGLIGGTKFLAPGTPARFSGSLLGGKAALTLSGVQPEDEAEYYCVLWYSNRWVFGSGTKLTVL

SEQ ID NO: 744 - protein, 125 aa, Artificial Sequence; identical to SEQ ID NO: 740
  Synthetic

SEQ ID NO: 745 - protein, 109 aa, Artificial Sequence
  Synthetic
QTVVTQEPSLTVSPGGTVTLTCGSSTGAVTSGNYPNWVQKKPGQAPRGLIGGTKFLAPGTPARFSGSLLGGKAALTLSGVQPEDEAEYYCVLWYSNRWVFGGGTKLTVL

SEQ ID NO: 746 - protein, 125 aa, Artificial Sequence; identical to SEQ ID NO: 740
  Synthetic

SEQ ID NO: 747 - protein, 109 aa, Artificial Sequence
  Synthetic
QTVVTQEPSLTVSPGGTVTLTCGSSTGAVTSGNYPNWVQKKPGQAPRGLIGGTKFLAPGTPARFSGSLLGGKAALTLSGVQPEDEAEYYCVLWYSNRWVFGSGTKLTVL

SEQ ID NO: 748 - protein, 125 aa, Artificial Sequence
  Synthetic
EVQLVESGGGLVQPGGSLKLSCAASGFTFNSYAMNWVRQAPGKGVEWVARIRSKYNNYATYYADSVKGRFTISRDDSKNTAYLQMNNLKTEDTAVYYCVRHGNFGNSYVSWWAYWGQGTLVTVSS

SEQ ID NO: 749 - protein, 109 aa, Artificial Sequence; identical to SEQ ID NO: 731
  Synthetic

SEQ ID NO: 750 - protein, 125 aa, Artificial Sequence; identical to SEQ ID NO: 748
  Synthetic

SEQ ID NO: 751 - protein, 109 aa, Artificial Sequence
  Synthetic
QTVVTQEPSLTVSPGGTVTLTCGSSTGAVTSGNYPNWFQQKPGQAPRGLIGGTKFLAPGTPARFSGSLLGGKAALTLSGVQPEDEAEYYCVLWYSNRWVFGGGTKLTVL

SEQ ID NO: 752 - protein, 125 aa, Artificial Sequence; identical to SEQ ID NO: 748
  Synthetic

SEQ ID NO: 753 - protein, 109 aa, Artificial Sequence
  Synthetic
QTVVTQEPSLTVSPGGTVTLTCGSSTGAVTSGNYPNWYQQKPGQAPRGLIGGTKFLAPGTPARFSGSLLGGKAALTLSGVQPEDEAEYYCVLWYSNRWVFGGGTKLTVL

SEQ ID NO: 754 - protein, 5 aa, Artificial Sequence
  Synthetic
SYAFN

SEQ ID NO: 755 - protein, 19 aa, Artificial Sequence
  Synthetic
RIRSKYNNYATYYADSVKG

SEQ ID NO: 756 - protein, 14 aa, Artificial Sequence
  Synthetic
HGNFGNSYVSWWAY

SEQ ID NO: 757 - protein, 14 aa, Artificial Sequence
  Synthetic
GSSTGAVTSGNYPN

SEQ ID NO: 758 - protein, 7 aa, Artificial Sequence
  Synthetic
GTKFLAP

SEQ ID NO: 759 - protein, 9 aa, Artificial Sequence
  Synthetic
VLWYSNRWV

SEQ ID NO: 760 - protein, 125 aa, Artificial Sequence
  Synthetic
EVQLVESGGGLVQPGGSLKLSCAASGFTFNSYAFNWVRQAPGKGLEWVARIRSKYNNYATYYADSVKGRFTISRDDSKNTVYLQMNNLKTEDTAVYYCVRHGNFGNSYVSWWAYWGQGTLVTVSS

SEQ ID NO: 761 - protein, 109 aa, Artificial Sequence; identical to SEQ ID NO: 731
  Synthetic

SEQ ID NO: 762 - protein, 5 aa, Artificial Sequence
  Synthetic
SYAIN

SEQ ID NO: 763 - protein, 19 aa, Artificial Sequence
  Synthetic
RIRSKYNNYATYYADSVKG

SEQ ID NO: 764 - protein, 14 aa, Artificial Sequence
  Synthetic
HGNFGNSYVSWWAY

SEQ ID NO: 765 - protein, 14 aa, Artificial Sequence
  Synthetic
GSSTGAVTSGNYPN

SEQ ID NO: 766 - protein, 7 aa, Artificial Sequence
  Synthetic
GTKFLAP

SEQ ID NO: 767 - protein, 9 aa, Artificial Sequence
  Synthetic
VLWYSNRWV

SEQ ID NO: 768 - protein, 125 aa, Artificial Sequence
  Synthetic
EVQLVESGGGLVQPGGSLKLSCAASGFTFNSYAINWVRQAPGKGLEWVARIRSKYNNYATYYADSVKGRFTISRDDSKNTAYLQMNNLKTEDTAVYYCVRHGNFGNSYVSWWAYWGQGTLVTVSS

SEQ ID NO: 769 - protein, 109 aa, Artificial Sequence; identical to SEQ ID NO: 731
  Synthetic

SEQ ID NO: 770 - protein, 125 aa, Artificial Sequence
  Synthetic
EVQLVESGGGLVQPGGSLKLSCAASGFTFNSYAINWVRQAPGKGLEWVARIRSKYNNYATYYADSVKGRFTISRDDSKNTLYLQMNNLKTEDTAVYYCVRHGNFGNSYVSWWAYWGQGTLVTVSS

SEQ ID NO: 771 - protein, 109 aa, Artificial Sequence; identical to SEQ ID NO: 731
  Synthetic

SEQ ID NO: 772 - protein, 125 aa, Artificial Sequence
  Synthetic
EVQLVESGGGLVQPGGSLKLSCAASGFTFNSYAINWVRQAPGKGLEWVARIRSKYNNYATYYADSVKGRFTISRDDSKNTVYLQMNNLKTEDTAVYYCVRHGNFGNSYVSWWAYWGQGTLVTVSS

SEQ ID NO: 773 - protein, 109 aa, Artificial Sequence; identical to SEQ ID NO: 731
  Synthetic

SEQ ID NO: 774 - protein, 125 aa, Artificial Sequence; identical to SEQ ID NO: 772
  Synthetic

SEQ ID NO: 775 - protein, 109 aa, Artificial Sequence; identical to SEQ ID NO: 743
  Synthetic

SEQ ID NO: 776 - protein, 125 aa, Artificial Sequence; identical to SEQ ID NO: 772
  Synthetic

SEQ ID NO: 777 - protein, 109 aa, Artificial Sequence; identical to SEQ ID NO: 745
  Synthetic

SEQ ID NO: 778 - protein, 125 aa, Artificial Sequence
  Synthetic
EVQLVESGGGLVQPGGSLKLSCAASGFTFNSYAINWVRQAPGKGVEWVARIRSKYNNYATYYADSVKGRFTISRDDSKNTVYLQMNNLKTEDTAVYYCVRHGNFGNSYVSWWAYWGQGTLVTVSS

SEQ ID NO: 779 - protein, 109 aa, Artificial Sequence
  Synthetic
QTVVTQEPSLTVSPGGTVTITCGSSTGAVTSGNYPNWFQKKPGQAPRGLIGGTKFLAPGTPARFSGSLLGGKAALTLSGVQPEDEAEYYCVLWYSNRWVFGSGTKLTVL

SEQ ID NO: 780 - protein, 125 aa, Artificial Sequence; identical to SEQ ID NO: 768
  Synthetic

SEQ ID NO: 781 - protein, 109 aa, Artificial Sequence; identical to SEQ ID NO: 743
  Synthetic

SEQ ID NO: 782 - protein, 125 aa, Artificial Sequence
  Synthetic
EVQLVESGGGLVQPGGSLKLSCAASGFTFNSYAINWVREAPGKGLEWVARIRSKYNNYATYYADSVKGRFTISRDDSKNTVYLQMNNLKTEDTAVYYCVRHGNFGNSYVSWWAYWGQGTLVTVSS

SEQ ID NO: 783 - protein, 109 aa, Artificial Sequence; identical to SEQ ID NO: 743
  Synthetic

SEQ ID NO: 784 - protein, 5 aa, Artificial Sequence
  Synthetic
SYAVN

SEQ ID NO: 785 - protein, 19 aa, Artificial Sequence
  Synthetic
RIRSKYNNYATYYADSVKG

SEQ ID NO: 786 - protein, 14 aa, Artificial Sequence
  Synthetic
HGNFGNSYVSWWAY

SEQ ID NO: 787 - protein, 14 aa, Artificial Sequence
  Synthetic
GSSTGAVTSGNYPN

SEQ ID NO: 788 - protein, 7 aa, Artificial Sequence
  Synthetic
GTKFLAP

SEQ ID NO: 789 - protein, 9 aa, Artificial Sequence
  Synthetic
VLWYSNRWV

SEQ ID NO: 790 - protein, 125 aa, Artificial Sequence
  Synthetic
EVQLVESGGGLVQPGGSLKLSCAASGFTFNSYAVNWVRQAPGKGLEWVARIRSKYNNYATYYADSVKGRFTISRDDSKNTAYLQMNNLKTEDTAVYYCVRHGNFGNSYVSWWAYWGQGTLVTVSS

SEQ ID NO: 791 - protein, 109 aa, Artificial Sequence; identical to SEQ ID NO: 731
  Synthetic

SEQ ID NO: 792 - protein, 125 aa, Artificial Sequence
  Synthetic
EVQLVESGGGLVQPGGSLKLSCAASGFTFNSYAMNWVRDAPGKGLEWVARIRSKYNNYATYYADSVKGRFTISRDDSKNTAYLQMNNLKTEDTAVYYCVRHGNFGNSYVSWWAYWGQGTLVTVSS

SEQ ID NO: 793 - protein, 109 aa, Artificial Sequence; identical to SEQ ID NO: 731
  Synthetic

SEQ ID NO: 794 - protein, 125 aa, Artificial Sequence; identical to SEQ ID NO: 792
  Synthetic

SEQ ID NO: 795 - protein, 109 aa, Artificial Sequence; identical to SEQ ID NO: 743
  Synthetic

SEQ ID NO: 796 - protein, 125 aa, Artificial Sequence; identical to SEQ ID NO: 792
  Synthetic

SEQ ID NO: 797 - protein, 109 aa, Artificial Sequence
  Synthetic
QTVVTQEPSLTVSPGGTVTITCGSSTGAVTSGNYPNWVQRKPGQAPRGLIGGTKFLAPGTPARFSGSLLGGKAALTLSGVQPEDEAEYYCVLWYSNRWVFGSGTKLTVL

SEQ ID NO: 798 - protein, 125 aa, Artificial Sequence; identical to SEQ ID NO: 792
  Synthetic

SEQ ID NO: 799 - protein, 109 aa, Artificial Sequence; identical to SEQ ID NO: 745
  Synthetic

SEQ ID NO: 800 - protein, 125 aa, Artificial Sequence; identical to SEQ ID NO: 792
  Synthetic

SEQ ID NO: 801 - protein, 109 aa, Artificial Sequence; identical to SEQ ID NO: 747
  Synthetic

SEQ ID NO: 802 - protein, 125 aa, Artificial Sequence; identical to SEQ ID NO: 792
  Synthetic

SEQ ID NO: 803 - protein, 109 aa, Artificial Sequence
  Synthetic
QTVVTQEPSLTVSPGGTVTLTCGSSTGAVTSGNYPNWVQRKPGQAPRGLIGGTKFLAPGTPARFSGSLLGGKAALTLSGVQPEDEAEYYCVLWYSNRWVFGGGTKLTVL

SEQ ID NO: 804 - protein, 125 aa, Artificial Sequence; identical to SEQ ID NO: 792
  Synthetic

SEQ ID NO: 805 - protein, 109 aa, Artificial Sequence
  Synthetic
QTVVTQEPSLTVSPGGTVTLTCGSSTGAVTSGNYPNWVQRKPGQAPRGLIGGTKFLAPGTPARFSGSLLGGKAALTLSGVQPEDEAEYYCVLWYSNRWVFGSGTKLTVL

SEQ ID NO: 806 - protein, 125 aa, Artificial Sequence
  Synthetic
EVQLVESGGGLVQPGGSLKLSCAASGFTFNSYAMNWVREAPGKGLEWVARIRSKYNNYATYYADSVKGRFTISRDDSKNTAYLQMNNLKTEDTAVYYCVRHGNFGNSYVSWWAYWGQGTLVTVSS

SEQ ID NO: 807 - protein, 109 aa, Artificial Sequence; identical to SEQ ID NO: 731
  Synthetic

SEQ ID NO: 808 - protein, 125 aa, Artificial Sequence; identical to SEQ ID NO: 806
  Synthetic

SEQ ID NO: 809 - protein, 109 aa, Artificial Sequence; identical to SEQ ID NO: 743
  Synthetic

SEQ ID NO: 810 - protein, 125 aa, Artificial Sequence; identical to SEQ ID NO: 806
  Synthetic

SEQ ID NO: 811 - protein, 109 aa, Artificial Sequence; identical to SEQ ID NO: 797
  Synthetic

SEQ ID NO: 812 - protein, 125 aa, Artificial Sequence; identical to SEQ ID NO: 806
  Synthetic

SEQ ID NO: 813 - protein, 109 aa, Artificial Sequence; identical to SEQ ID NO: 745
  Synthetic

SEQ ID NO: 814 - protein, 125 aa, Artificial Sequence; identical to SEQ ID NO: 806
  Synthetic

SEQ ID NO: 815 - protein, 109 aa, Artificial Sequence; identical to SEQ ID NO: 747
  Synthetic

SEQ ID NO: 816 - protein, 125 aa, Artificial Sequence; identical to SEQ ID NO: 806
  Synthetic

SEQ ID NO: 817 - protein, 109 aa, Artificial Sequence; identical to SEQ ID NO: 803
  Synthetic

SEQ ID NO: 818 - protein, 125 aa, Artificial Sequence; identical to SEQ ID NO: 806
  Synthetic

SEQ ID NO: 819 - protein, 109 aa, Artificial Sequence; identical to SEQ ID NO: 805
  Synthetic

SEQ ID NO: 820 - protein, 125 aa, Artificial Sequence
  Synthetic
EVQLVESGGGLVQPGGSLKLSCAASGFTFNSYAMNWVRKAPGKGLEWVARIRSKYNNYATYYADSVKGRFTISRDDSKNTAYLQMNNLKTEDTAVYYCVRHGNFGNSYVSWWAYWGQGTLVTVSS

SEQ ID NO: 821 - protein, 109 aa, Artificial Sequence; identical to SEQ ID NO: 731
  Synthetic

SEQ ID NO: 822 - protein, 125 aa, Artificial Sequence
  Synthetic
EVQLVESGGGLVQPGGSLKLSCAASGFTFNSYAMNWVRRAPGKGLEWVARIRSKYNNYATYYADSVKGRFTISRDDSKNTAYLQMNNLKTEDTAVYYCVRHGNFGNSYVSWWAYWGQGTLVTVSS

SEQ ID NO: 823 - protein, 109 aa, Artificial Sequence; identical to SEQ ID NO: 731
  Synthetic

SEQ ID NO: 824 - protein, 125 aa, Artificial Sequence
  Synthetic
EVQLVESGGGLVQPGGSLKLSCAASGFTFNSYAMNWVRQAPGKGLEWVARIRSKYNNYATYYADSVKGRFTISRDDSKNTAYLQMNNLKTEDTAVYYCARHGNFGNSYVSWWAYWGQGTLVTVSS

SEQ ID NO: 825 - protein, 109 aa, Artificial Sequence; identical to SEQ ID NO: 731
  Synthetic

SEQ ID NO: 826 - protein, 125 aa, Artificial Sequence
  Synthetic
EVQLVESGGGLVQPGGSLKLSCAASGFTFNSYAMNWVRQAPGKGLEWVARIRSKYNNYATYYADSVKGRFTISRDDSKNTAYLQMNNLKTEDTAVYYCLRHGNFGNSYVSWWAYWGQGTLVTVSS

SEQ ID NO: 827 - protein, 109 aa, Artificial Sequence; identical to SEQ ID NO: 731
  Synthetic

SEQ ID NO: 828 - protein, 5 aa, Artificial Sequence
  Synthetic
SYAMN

SEQ ID NO: 829 - protein, 19 aa, Artificial Sequence
  Synthetic
RIRSKYNNYATYYADSVKG

SEQ ID NO: 830 - protein, 14 aa, Artificial Sequence
  Synthetic
HGNFGNSYVSWFAY

SEQ ID NO: 831 - protein, 14 aa, Artificial Sequence
  Synthetic
GSSTGAVTSGNYPN

SEQ ID NO: 832 - protein, 7 aa, Artificial Sequence
  Synthetic
GTKFLAP

SEQ ID NO: 833 - protein, 9 aa, Artificial Sequence
  Synthetic
VLWYSNRWV

SEQ ID NO: 834 - protein, 125 aa, Artificial Sequence
  Synthetic
EVQLVESGGGLVQPGGSLKLSCAASGFTFNSYAMNWVRQAPGKGLEWVARIRSKYNNYATYYADSVKGRFTISRDDSKNTAYLQMNNLKTEDTAVYYCVRHGNFGNSYVSWFAYWGQGTLVTVSS

SEQ ID NO: 835 - protein, 109 aa, Artificial Sequence; identical to SEQ ID NO: 731
  Synthetic

SEQ ID NO: 836 - protein, 125 aa, Artificial Sequence; identical to SEQ ID NO: 834
  Synthetic

SEQ ID NO: 837 - protein, 109 aa, Artificial Sequence
  Synthetic
QTVVTQEPSLTVSPGGTVTLTCGSSTGAVTSGNYPNWIQQKPGQAPRGLIGGTKFLAPGTPARFSGSLLGGKAALTLSGVQPEDEAEYYCVLWYSNRWVFGGGTKLTVL

SEQ ID NO: 838 - protein, 125 aa, Artificial Sequence; identical to SEQ ID NO: 834
  Synthetic

SEQ ID NO: 839 - protein, 109 aa, Artificial Sequence
  Synthetic
QTVVTQEPSLTVSPGGTVTLTCGSSTGAVTSGNYPNWLQQKPGQAPRGLIGGTKFLAPGTPARFSGSLLGGKAALTLSGVQPEDEAEYYCVLWYSNRWVFGGGTKLTVL

SEQ ID NO: 840 - protein, 5 aa, Artificial Sequence
  Synthetic
SYAIN

SEQ ID NO: 841 - protein, 19 aa, Artificial Sequence
  Synthetic
RIRSKYNNYATYYADAVKG

SEQ ID NO: 842 - protein, 14 aa, Artificial Sequence
  Synthetic
AGNFGSSYVSWWAY

SEQ ID NO: 843 - protein, 14 aa, Artificial Sequence
  Synthetic
GSSTGAVTSGNYPN

SEQ ID NO: 844 - protein, 7 aa, Artificial Sequence
  Synthetic
GTKFLAP

SEQ ID NO: 845 - protein, 9 aa, Artificial Sequence
  Synthetic
VLWYSNRWV

SEQ ID NO: 846 - protein, 125 aa, Artificial Sequence
  Synthetic
EVQLVESGGGLVQPGGSLKLSCAASGFTFNSYAINWVRQAPGKGLEWVARIRSKYNNYATYYADAVKGRFTISRDDSKNTVYLQMNNLKTEDTAVYYCARAGNFGSSYVSWWAYWGQGTLVTVSS

SEQ ID NO: 847 - protein, 109 aa, Artificial Sequence; identical to SEQ ID NO: 91
  Synthetic

SEQ ID NO: 848 - protein, 5 aa, Artificial Sequence
  Synthetic
SYAMN

SEQ ID NO: 849 - protein, 19 aa, Artificial Sequence
  Synthetic
RIRSKYNNYATYYAEAVKG

SEQ ID NO: 850 - protein, 14 aa, Artificial Sequence
  Synthetic
NENIGTSYVSWWAY

SEQ ID NO: 851 - protein, 14 aa, Artificial Sequence
  Synthetic
GSSTGAVTSGNYPN

SEQ ID NO: 852 - protein, 7 aa, Artificial Sequence
  Synthetic
GTKFLAP

SEQ ID NO: 853 - protein, 9 aa, Artificial Sequence
  Synthetic
VLWYSNRWV

SEQ ID NO: 854 - protein, 125 aa, Artificial Sequence
  Synthetic
EVQLVESGGGLVQPGGSLKLSCAASGFTFNSYAMNWVRQAPGKGLEWVARIRSKYNNYATYYAEAVKGRFTISRDDSKNTVYLQMNNLKTEDTAVYYCVRNENIGTSYVSWWAYWGQGTLVTVSS

SEQ ID NO: 855 - protein, 109 aa, Artificial Sequence; identical to SEQ ID NO: 101
  Synthetic

SEQ ID NO: 856 - protein, 5 aa, Artificial Sequence
  Synthetic
SYAMN

SEQ ID NO: 857 - protein, 19 aa, Artificial Sequence
  Synthetic
RIRSKYNNYATYYADAVKG

SEQ ID NO: 858 - protein, 14 aa, Artificial Sequence
  Synthetic
AGNFGSSYVSWFAY

SEQ ID NO: 859 - protein, 14 aa, Artificial Sequence
  Synthetic
GSSTGAVTSGNYPN

SEQ ID NO: 860 - protein, 7 aa, Artificial Sequence
  Synthetic
GTKFLAP

SEQ ID NO: 861 - protein, 9 aa, Artificial Sequence
  Synthetic
VLYYSNRWV

SEQ ID NO: 862 - protein, 125 aa, Artificial Sequence
  Synthetic
EVQLVESGGGLVQPGGSLKLSCAASGFTFNSYAMNWVRQAPGKGMEWVARIRSKYNNYATYYADAVKGRFTISRDDSKNTLYLQMNNLKTEDTAVYYCVRAGNFGSSYVSWFAYWGQGTLVTVSS

SEQ ID NO: 863 - protein, 109 aa, Artificial Sequence
  Synthetic
QTVVTQEPSLTVSPGGTVTITCGSSTGAVTSGNYPNWIQKKPGQAPRGLIGGTKFLAPGTPARFSGSLEGGKAALTLSGVQPEDEAEYYCVLYYSNRWVFGSGTKLTVL

SEQ ID NO: 864 - protein, 5 aa, Artificial Sequence
  Synthetic
SYAMN

SEQ ID NO: 865 - protein, 19 aa, Artificial Sequence
  Synthetic
RIRSKYNNYATYYADAVKG

SEQ ID NO: 866 - protein, 14 aa, Artificial Sequence
  Synthetic
AGNFGTSYVSWWAY

SEQ ID NO: 867 - protein, 14 aa, Artificial Sequence
  Synthetic
GSSTGAVTSGNYPN

SEQ ID NO: 868 - protein, 7 aa, Artificial Sequence
  Synthetic
GTKFLAP

SEQ ID NO: 869 - protein, 9 aa, Artificial Sequence
  Synthetic
VLWYSNRWV

SEQ ID NO: 870 - protein, 125 aa, Artificial Sequence
  Synthetic
EVQLVESGGGLVQPGGSLKLSCAASGFTFNSYAMNWVRQAPGKGMEWVARIRSKYNNYATYYADAVKGRFTISRDDSKNTLYLQMNNLKTEDTAVYYCVRAGNFGTSYVSWWAYWGQGTLVTVSS

SEQ ID NO: 871 - protein, 109 aa, Artificial Sequence; identical to SEQ ID NO: 91
  Synthetic

SEQ ID NO: 872 - protein, 5 aa, Artificial Sequence
  Synthetic
SYAIN

SEQ ID NO: 873 - protein, 19 aa, Artificial Sequence
  Synthetic
RIRSKYNNYATYYADAVKG

SEQ ID NO: 874 - protein, 14 aa, Artificial Sequence
  Synthetic
NANFGTSYVSWFAY

SEQ ID NO: 875 - protein, 14 aa, Artificial Sequence
  Synthetic
GSSTGAVTSGNYPN

SEQ ID NO: 876 - protein, 7 aa, Artificial Sequence
  Synthetic
GTKFLAP

SEQ ID NO: 877 - protein, 9 aa, Artificial Sequence
  Synthetic
VLWYSNRWV

SEQ ID NO: 878 - protein, 125 aa, Artificial Sequence
  Synthetic
EVQLVESGGGLVQPGGSLKLSCAASGFTFNSYAINWVREAPGKGLEWVARIRSKYNNYATYYADAVKGRFTISRDDSKNTAYLQMNNLKTEDTAVYYCVRNANFGTSYVSWFAYWGQGTLVTVSS

SEQ ID NO: 879 - protein, 109 aa, Artificial Sequence; identical to SEQ ID NO: 747
  Synthetic

SEQ ID NO: 880 - protein, 125 aa, Artificial Sequence; identical to SEQ ID NO: 730
  Synthetic

SEQ ID NO: 881 - protein, 109 aa, Artificial Sequence
  Synthetic
QTVVTQEPSLTVSPGGTVTLTCGSSTGAVTSGNYPNWVQQKPGQAPRGLIGGTKFLAPGTPARFSGSLLGGKAALTLSGVQPEDEAEYYCVLWYSNRWVFGSGTKLTVL

SEQ ID NO: 882 - protein, 125 aa, Artificial Sequence; identical to SEQ ID NO: 730
  Synthetic

SEQ ID NO: 883 - protein, 109 aa, Artificial Sequence
  Synthetic
QTVVTQEPSLTVSPGGTVTITCGSSTGAVTSGNYPNWVQQKPGQAPRGLIGGTKFLAPGTPARFSGSLLGGKAALTLSGVQPEDEAEYYCVLWYSNRWVFGSGTKLTVL

SEQ ID NO: 884 - protein, 125 aa, Artificial Sequence; identical to SEQ ID NO: 730
  Synthetic

SEQ ID NO: 885 - protein, 109 aa, Artificial Sequence
  Synthetic
QTVVTQEPSLTVSPGGTVTLTCGSSTGAVTSGNYPNWVQQKPGQAPRGLIGGTKFLAPGTPARFSGSLEGGKAALTLSGVQPEDEAEYYCVLWYSNRWVFGGGTKLTVL

SEQ ID NO: 886 - protein, 125 aa, Artificial Sequence; identical to SEQ ID NO: 730
  Synthetic

SEQ ID NO: 887 - protein, 109 aa, Artificial Sequence
  Synthetic
QTVVTQEPSLTVSPGGTVTLTCGSSTGAVTSGNYPNWVQQKPGQAPRGLIGGTKFLAPGTPARFSGSLSGGKAALTLSGVQPEDEAEYYCVLWYSNRWVFGGGTKLTVL

SEQ ID NO: 888 - protein, 125 aa, Artificial Sequence; identical to SEQ ID NO: 730
  Synthetic

SEQ ID NO: 889 - protein, 109 aa, Artificial Sequence
  Synthetic
QTVVTQEPSLTVSPGGTVTLTCGSSTGAVTSGNYPNWVQEKPGQAPRGLIGGTKFLAPGTPARFSGSLLGGKAALTLSGVQPEDEAEYYCVLWYSNRWVFGGGTKLTVL

SEQ ID NO: 890 - protein, 125 aa, Artificial Sequence; identical to SEQ ID NO: 730
  Synthetic

SEQ ID NO: 891 - protein, 109 aa, Artificial Sequence; identical to SEQ ID NO: 745
  Synthetic

SEQ ID NO: 892 - protein, 5 aa, Artificial Sequence
  Synthetic
SYAMN

SEQ ID NO: 893 - protein, 19 aa, Artificial Sequence
  Synthetic
RIRSKYNNYATYYADSVKG

SEQ ID NO: 894 - protein, 14 aa, Artificial Sequence
  Synthetic
HGNFGNSYVSWWAY

SEQ ID NO: 895 - protein, 14 aa, Artificial Sequence
  Synthetic
GSSTGAVTSGNYPN

SEQ ID NO: 896 - protein, 7 aa, Artificial Sequence
  Synthetic
GTKFLAP

SEQ ID NO: 897 - protein, 9 aa, Artificial Sequence
  Synthetic
ALWYSNRWV

SEQ ID NO: 898 - protein, 125 aa, Artificial Sequence; identical to SEQ ID NO: 730
  Synthetic

SEQ ID NO: 899 - protein, 109 aa, Artificial Sequence
  Synthetic
QTVVTQEPSLTVSPGGTVTLTCGSSTGAVTSGNYPNWVQQKPGQAPRGLIGGTKFLAPGTPARFSGSLLGGKAALTLSGVQPEDEAEYYCALWYSNRWVFGGGTKLTVL

SEQ ID NO: 900 - protein, 5 aa, Artificial Sequence
  Synthetic
SYAMN

SEQ ID NO: 901 - protein, 19 aa, Artificial Sequence
  Synthetic
RIRSKYNNYATYYADSVKG

SEQ ID NO: 902 - protein, 14 aa, Artificial Sequence
  Synthetic
HGNFGNSYVSWWAY

SEQ ID NO: 903 - protein, 14 aa, Artificial Sequence
  Synthetic
GSSTGAVTSGNYPN

SEQ ID NO: 904 - protein, 7 aa, Artificial Sequence
  Synthetic
GTKFLAP

SEQ ID NO: 905 - protein, 9 aa, Artificial Sequence
  Synthetic
LLWYSNRWV

SEQ ID NO: 906 - protein, 125 aa, Artificial Sequence; identical to SEQ ID NO: 730
  Synthetic

SEQ ID NO: 907 - protein, 109 aa, Artificial Sequence
  Synthetic
QTVVTQEPSLTVSPGGTVTLTCGSSTGAVTSGNYPNWVQQKPGQAPRGLIGGTKFLAPGTPARFSGSLLGGKAALTLSGVQPEDEAEYYCLLWYSNRWVFGGGTKLTVL

SEQ ID NO: 908 - protein, 125 aa, Artificial Sequence; identical to SEQ ID NO: 730
  Synthetic

SEQ ID NO: 909 - protein, 109 aa, Artificial Sequence; identical to SEQ ID NO: 837
  Synthetic

SEQ ID NO: 910 - protein, 125 aa, Artificial Sequence; identical to SEQ ID NO: 730
  Synthetic

SEQ ID NO: 911 - protein, 109 aa, Artificial Sequence; identical to SEQ ID NO: 839
  Synthetic

SEQ ID NO: 912 - protein, 125 aa, Artificial Sequence; identical to SEQ ID NO: 730
  Synthetic

SEQ ID NO: 913 - protein, 109 aa, Artificial Sequence
  Synthetic
QTVVTQEPSLTVSPGGTVTLTCGSSTGAVTSGNYPNWMQQKPGQAPRGLIGGTKFLAPGTPARFSGSLLGGKAALTLSGVQPEDEAEYYCVLWYSNRWVFGGGTKLTVL

SEQ ID NO: 914 - protein, 5 aa, Artificial Sequence
  Synthetic
SYAMN

SEQ ID NO: 915 - protein, 19 aa, Artificial Sequence
  Synthetic
RIRSKYNNYATYYADSVKG

SEQ ID NO: 916 - protein, 14 aa, Artificial Sequence
  Synthetic
HGNFGNSYVSWWAY

SEQ ID NO: 917 - protein, 14 aa, Artificial Sequence
  Synthetic
GSSTGAVTSGNYPN

SEQ ID NO: 918 - protein, 7 aa, Artificial Sequence
  Synthetic
GTKFLAP

SEQ ID NO: 919 - protein, 9 aa, Artificial Sequence
  Synthetic
VLYYSNRWV

SEQ ID NO: 920 - protein, 125 aa, Artificial Sequence; identical to SEQ ID NO: 730
  Synthetic

SEQ ID NO: 921 - protein, 109 aa, Artificial Sequence
  Synthetic
QTVVTQEPSLTVSPGGTVTLTCGSSTGAVTSGNYPNWVQQKPGQAPRGLIGGTKFLAPGTPARFSGSLLGGKAALTLSGVQPEDEAEYYCVLYYSNRWVFGGGTKLTVL

SEQ ID NO: 922 - protein, 5 aa, Artificial Sequence
  Synthetic
IYAMN

SEQ ID NO: 923 - protein, 19 aa, Artificial Sequence
  Synthetic
RIRSKYNNYATYYADSVKS

SEQ ID NO: 924 - protein, 14 aa, Artificial Sequence
  Synthetic
HGNFGNSYVSFFAY

SEQ ID NO: 925 - protein, 14 aa, Artificial Sequence
  Synthetic
GSSTGAVTSGYYPN

SEQ ID NO: 926 - protein, 7 aa, Artificial Sequence
  Synthetic
GTKFLAP

SEQ ID NO: 927 - protein, 9 aa, Artificial Sequence
  Synthetic
ALWYSNRWV

SEQ ID NO: 928 - protein, 125 aa, Artificial Sequence
  Synthetic
EVQLVESGGGLVQPGGSLKLSCAASGFTFNIYAMNWVRQAPGKGLEWVARIRSKYNNYATYYADSVKSRFTISRDDSKNTAYLQMNNLKTEDTAVYYCVRHGNFGNSYVSFFAYWGQGTLVTVSS

SEQ ID NO: 929 - protein, 109 aa, Artificial Sequence; identical to SEQ ID NO: 363
  Synthetic

SEQ ID NO: 930 - protein, 125 aa, Artificial Sequence
  Synthetic
EVQLVESGGGLVQPGGSLKLSCAASGFTFNIYAMNWVRQAPGKGLEWVARIRSKYNNYATYYADSVKSRFTISRDDSKNTIYLQMNNLKTEDTAVYYCVRHGNFGNSYVSFFAYWGQGTLVTVSS

SEQ ID NO: 931 - protein, 109 aa, Artificial Sequence; identical to SEQ ID NO: 363
  Synthetic

SEQ ID NO: 932 - protein, 125 aa, Artificial Sequence
  Synthetic
EVQLVESGGGLVQPGGSLKLSCAASGFTFNIYAMNWVRQAPGKGLEWVARIRSKYNNYATYYADSVKSRFTISRDDSKNTLYLQMNNLKTEDTAVYYCVRHGNFGNSYVSFFAYWGQGTLVTVSS

SEQ ID NO: 933 - protein, 109 aa, Artificial Sequence; identical to SEQ ID NO: 363
  Synthetic

SEQ ID NO: 934 - protein, 125 aa, Artificial Sequence
  Synthetic
EVQLVESGGGLVQPGGSLKLSCAASGFTFNIYAMNWVRQAPGKGLEWVARIRSKYNNYATYYADSVKSRFTISRDDSKNTTYLQMNNLKTEDTAVYYCVRHGNFGNSYVSFFAYWGQGTLVTVSS

SEQ ID NO: 935 - protein, 109 aa, Artificial Sequence; identical to SEQ ID NO: 363
  Synthetic

SEQ ID NO: 936 - protein, 125 aa, Artificial Sequence
  Synthetic
EVQLVESGGGLVQPGGSLKLSCAASGFTFNIYAMNWVRQAPGKGLEWVARIRSKYNNYATYYADSVKSRFTISRDDSKNTVYLQMNNLKTEDTAVYYCVRHGNFGNSYVSFFAYWGQGTLVTVSS

SEQ ID NO: 937 - protein, 109 aa, Artificial Sequence; identical to SEQ ID NO: 363
  Synthetic

SEQ ID NO: 938 - protein, 125 aa, Artificial Sequence
  Synthetic
EVQLVESGGGLVQPGGSLKLSCAASGFTFNIYAMNWVRQAPGKGMEWVARIRSKYNNYATYYADSVKSRFTISRDDSKNTAYLQMNNLKTEDTAVYYCVRHGNFGNSYVSFFAYWGQGTLVTVSS

SEQ ID NO: 939 - protein, 109 aa, Artificial Sequence; identical to SEQ ID NO: 363
  Synthetic

SEQ ID NO: 940 - protein, 125 aa, Artificial Sequence; identical to SEQ ID NO: 938
  Synthetic

SEQ ID NO: 941 - protein, 109 aa, Artificial Sequence; identical to SEQ ID NO: 375
  Synthetic

SEQ ID NO: 942 - protein, 125 aa, Artificial Sequence; identical to SEQ ID NO: 938
  Synthetic

SEQ ID NO: 943 - protein, 109 aa, Artificial Sequence; identical to SEQ ID NO: 377
  Synthetic

SEQ ID NO: 944 - protein, 125 aa, Artificial Sequence; identical to SEQ ID NO: 938
  Synthetic

SEQ ID NO: 945 - protein, 109 aa, Artificial Sequence; identical to SEQ ID NO: 379
  Synthetic

SEQ ID NO: 946 - protein, 125 aa, Artificial Sequence
  Synthetic
EVQLVESGGGLVQPGGSLKLSCAASGFTFNIYAMNWVRQAPGKGVEWVARIRSKYNNYATYYADSVKSRFTISRDDSKNTAYLQMNNLKTEDTAVYYCVRHGNFGNSYVSFFAYWGQGTLVTVSS

SEQ ID NO: 947 - protein, 109 aa, Artificial Sequence; identical to SEQ ID NO: 363
  Synthetic

SEQ ID NO: 948 - protein, 125 aa, Artificial Sequence; identical to SEQ ID NO: 946
  Synthetic

SEQ ID NO: 949 - protein, 109 aa, Artificial Sequence; identical to SEQ ID NO: 383
  Synthetic

SEQ ID NO: 950 - protein, 125 aa, Artificial Sequence; identical to SEQ ID NO: 946
  Synthetic

SEQ ID NO: 951 - protein, 109 aa, Artificial Sequence; identical to SEQ ID NO: 385
  Synthetic

SEQ ID NO: 952 - protein, 5 aa, Artificial Sequence
  Synthetic
IYAFN

SEQ ID NO: 953 - protein, 19 aa, Artificial Sequence
  Synthetic
RIRSKYNNYATYYADSVKS

SEQ ID NO: 954 - protein, 14 aa, Artificial Sequence
  Synthetic
HGNFGNSYVSFFAY

SEQ ID NO: 955 - protein, 14 aa, Artificial Sequence
  Synthetic
GSSTGAVTSGYYPN

SEQ ID NO: 956 - protein, 7 aa, Artificial Sequence
  Synthetic
GTKFLAP

SEQ ID NO: 957 - protein, 9 aa, Artificial Sequence
  Synthetic
ALWYSNRWV

SEQ ID NO: 958 - protein, 125 aa, Artificial Sequence
  Synthetic
EVQLVESGGGLVQPGGSLKLSCAASGFTFNIYAFNWVRQAPGKGLEWVARIRSKYNNYATYYADSVKSRFTISRDDSKNTVYLQMNNLKTEDTAVYYCVRHGNFGNSYVSFFAYWGQGTLVTVSS

SEQ ID NO: 959 - protein, 109 aa, Artificial Sequence; identical to SEQ ID NO: 363
  Synthetic

SEQ ID NO: 960 - protein, 5 aa, Artificial Sequence
  Synthetic
IYAIN

SEQ ID NO: 961 - protein, 19 aa, Artificial Sequence
  Synthetic
RIRSKYNNYATYYADSVKS

SEQ ID NO: 962 - protein, 14 aa, Artificial Sequence
  Synthetic
HGNFGNSYVSFFAY

SEQ ID NO: 963 - protein, 14 aa, Artificial Sequence
  Synthetic
GSSTGAVTSGYYPN

SEQ ID NO: 964 - protein, 7 aa, Artificial Sequence
  Synthetic
GTKFLAP

SEQ ID NO: 965 - protein, 9 aa, Artificial Sequence
  Synthetic
ALWYSNRWV

SEQ ID NO: 966 - protein, 125 aa, Artificial Sequence
  Synthetic
EVQLVESGGGLVQPGGSLKLSCAASGFTFNIYAINWVRQAPGKGLEWVARIRSKYNNYATYYADSVKSRFTISRDDSKNTAYLQMNNLKTEDTAVYYCVRHGNFGNSYVSFFAYWGQGTLVTVSS

SEQ ID NO: 967 - protein, 109 aa, Artificial Sequence; identical to SEQ ID NO: 363
  Synthetic

SEQ ID NO: 968 - protein, 125 aa, Artificial Sequence
  Synthetic
EVQLVESGGGLVQPGGSLKLSCAASGFTFNIYAINWVRQAPGKGLEWVARIRSKYNNYATYYADSVKSRFTISRDDSKNTLYLQMNNLKTEDTAVYYCVRHGNFGNSYVSFFAYWGQGTLVTVSS

SEQ ID NO: 969 - protein, 109 aa, Artificial Sequence; identical to SEQ ID NO: 363
  Synthetic

SEQ ID NO: 970 - protein, 125 aa, Artificial Sequence
  Synthetic
EVQLVESGGGLVQPGGSLKLSCAASGFTFNIYAINWVRQAPGKGLEWVARIRSKYNNYATYYADSVKSRFTISRDDSKNTVYLQMNNLKTEDTAVYYCVRHGNFGNSYVSFFAYWGQGTLVTVSS

SEQ ID NO: 971 - protein, 109 aa, Artificial Sequence; identical to SEQ ID NO: 363
  Synthetic

SEQ ID NO: 972 - protein, 125 aa, Artificial Sequence; identical to SEQ ID NO: 970
  Synthetic

SEQ ID NO: 973 - protein, 109 aa, Artificial Sequence; identical to SEQ ID NO: 375
  Synthetic

SEQ ID NO: 974 - protein, 125 aa, Artificial Sequence; identical to SEQ ID NO: 970
  Synthetic

SEQ ID NO: 975 - protein, 109 aa, Artificial Sequence; identical to SEQ ID NO: 377
  Synthetic

SEQ ID NO: 976 - protein, 125 aa, Artificial Sequence
  Synthetic
EVQLVESGGGLVQPGGSLKLSCAASGFTFNIYAINWVRQAPGKGVEWVARIRSKYNNYATYYADSVKSRFTISRDDSKNTVYLQMNNLKTEDTAVYYCVRHGNFGNSYVSFFAYWGQGTLVTVSS

SEQ ID NO: 977 - protein, 109 aa, Artificial Sequence; identical to SEQ ID NO: 411
  Synthetic

SEQ ID NO: 978 - protein, 125 aa, Artificial Sequence; identical to SEQ ID NO: 966
  Synthetic

SEQ ID NO: 979 - protein, 109 aa, Artificial Sequence; identical to SEQ ID NO: 375
  Synthetic

SEQ ID NO: 980 - protein, 125 aa, Artificial Sequence
  Synthetic
EVQLVESGGGLVQPGGSLKLSCAASGFTFNIYAINWVREAPGKGLEWVARIRSKYNNYATYYADSVKSRFTISRDDSKNTVYLQMNNLKTEDTAVYYCVRHGNFGNSYVSFFAYWGQGTLVTVSS

SEQ ID NO: 981 - protein, 109 aa, Artificial Sequence; identical to SEQ ID NO: 375
  Synthetic

SEQ ID NO: 982 - protein, 5 aa, Artificial Sequence
  Synthetic
IYAVN

SEQ ID NO: 983 - protein, 19 aa, Artificial Sequence
  Synthetic
RIRSKYNNYATYYADSVKS

SEQ ID NO: 984 - protein, 14 aa, Artificial Sequence
  Synthetic
HGNFGNSYVSFFAY

SEQ ID NO: 985 - protein, 14 aa, Artificial Sequence
  Synthetic
GSSTGAVTSGYYPN

SEQ ID NO: 986 - protein, 7 aa, Artificial Sequence
  Synthetic
GTKFLAP

SEQ ID NO: 987 - protein, 9 aa, Artificial Sequence
  Synthetic
ALWYSNRWV

SEQ ID NO: 988 - protein, 125 aa, Artificial Sequence
  Synthetic
EVQLVESGGGLVQPGGSLKLSCAASGFTFNIYAVNWVRQAPGKGLEWVARIRSKYNNYATYYADSVKSRFTISRDDSKNTAYLQMNNLKTEDTAVYYCVRHGNFGNSYVSFFAYWGQGTLVTVSS

SEQ ID NO: 989 - protein, 109 aa, Artificial Sequence; identical to SEQ ID NO: 363
  Synthetic

SEQ ID NO: 990 - protein, 125 aa, Artificial Sequence
  Synthetic
EVQLVESGGGLVQPGGSLKLSCAASGFTFNIYAMNWVRDAPGKGLEWVARIRSKYNNYATYYADSVKSRFTISRDDSKNTAYLQMNNLKTEDTAVYYCVRHGNFGNSYVSFFAYWGQGTLVTVSS

SEQ ID NO: 991 - protein, 109 aa, Artificial Sequence; identical to SEQ ID NO: 363
  Synthetic

SEQ ID NO: 992 - protein, 125 aa, Artificial Sequence; identical to SEQ ID NO: 990
  Synthetic

SEQ ID NO: 993 - protein, 109 aa, Artificial Sequence; identical to SEQ ID NO: 375
  Synthetic

SEQ ID NO: 994 - protein, 125 aa, Artificial Sequence; identical to SEQ ID NO: 990
  Synthetic

SEQ ID NO: 995 - protein, 109 aa, Artificial Sequence; identical to SEQ ID NO: 429
  Synthetic

SEQ ID NO: 996 - protein, 125 aa, Artificial Sequence; identical to SEQ ID NO: 990
  Synthetic

SEQ ID NO: 997 - protein, 109 aa, Artificial Sequence; identical to SEQ ID NO: 377
  Synthetic

SEQ ID NO: 998 - protein, 125 aa, Artificial Sequence; identical to SEQ ID NO: 990
  Synthetic

SEQ ID NO: 999 - protein, 109 aa, Artificial Sequence; identical to SEQ ID NO: 379
  Synthetic

SEQ ID NO: 1000 - protein, 125 aa, Artificial Sequence; identical to SEQ ID NO: 990
  Synthetic

SEQ ID NO: 1001 - protein, 109 aa, Artificial Sequence; identical to SEQ ID NO: 435
  Synthetic

SEQ ID NO: 1002 - protein, 125 aa, Artificial Sequence; identical to SEQ ID NO: 990
  Synthetic

SEQ ID NO: 1003 - protein, 109 aa, Artificial Sequence; identical to SEQ ID NO: 437
  Synthetic

SEQ ID NO: 1004 - protein, 125 aa, Artificial Sequence
  Synthetic
EVQLVESGGGLVQPGGSLKLSCAASGFTFNIYAMNWVREAPGKGLEWVARIRSKYNNYATYYADSVKSRFTISRDDSKNTAYLQMNNLKTEDTAVYYCVRHGNFGNSYVSFFAYWGQGTLVTVSS

SEQ ID NO: 1005 - protein, 109 aa, Artificial Sequence; identical to SEQ ID NO: 363
  Synthetic

SEQ ID NO: 1006 - protein, 125 aa, Artificial Sequence; identical to SEQ ID NO: 1004
  Synthetic

SEQ ID NO: 1007 - protein, 109 aa, Artificial Sequence; identical to SEQ ID NO: 375
  Synthetic

SEQ ID NO: 1008 - protein, 125 aa, Artificial Sequence; identical to SEQ ID NO: 1004
  Synthetic

SEQ ID NO: 1009 - protein, 109 aa, Artificial Sequence; identical to SEQ ID NO: 429
  Synthetic

SEQ ID NO: 1010 - protein, 125 aa, Artificial Sequence; identical to SEQ ID NO: 1004
  Synthetic

SEQ ID NO: 1011 - protein, 109 aa, Artificial Sequence; identical to SEQ ID NO: 377
  Synthetic

SEQ ID NO: 1012 - protein, 125 aa, Artificial Sequence; identical to SEQ ID NO: 1004
  Synthetic

SEQ ID NO: 1013 - protein, 109 aa, Artificial Sequence; identical to SEQ ID NO: 379
  Synthetic

SEQ ID NO: 1014 - protein, 125 aa, Artificial Sequence; identical to SEQ ID NO: 1004
  Synthetic

SEQ ID NO: 1015 - protein, 109 aa, Artificial Sequence; identical to SEQ ID NO: 435
  Synthetic

SEQ ID NO: 1016 - protein, 125 aa, Artificial Sequence; identical to SEQ ID NO: 1004
  Synthetic

SEQ ID NO: 1017 - protein, 109 aa, Artificial Sequence; identical to SEQ ID NO: 437
  Synthetic

SEQ ID NO: 1018 - protein, 125 aa, Artificial Sequence
  Synthetic
EVQLVESGGGLVQPGGSLKLSCAASGFTFNIYAMNWVRKAPGKGLEWVARIRSKYNNYATYYADSVKSRFTISRDDSKNTAYLQMNNLKTEDTAVYYCVRHGNFGNSYVSFFAYWGQGTLVTVSS

SEQ ID NO: 1019 - protein, 109 aa, Artificial Sequence; identical to SEQ ID NO: 363
  Synthetic

SEQ ID NO: 1020 - protein, 125 aa, Artificial Sequence
  Synthetic
EVQLVESGGGLVQPGGSLKLSCAASGFTFNIYAMNWVRRAPGKGLEWVARIRSKYNNYATYYADSVKSRFTISRDDSKNTAYLQMNNLKTEDTAVYYCVRHGNFGNSYVSFFAYWGQGTLVTVSS

SEQ ID NO: 1021 - protein, 109 aa, Artificial Sequence; identical to SEQ ID NO: 363
  Synthetic

SEQ ID NO: 1022 - protein, 125 aa, Artificial Sequence
  Synthetic
EVQLVESGGGLVQPGGSLKLSCAASGFTFNIYAMNWVRQAPGKGLEWVARIRSKYNNYATYYADSVKSRFTISRDDSKNTAYLQMNNLKTEDTAVYYCARHGNFGNSYVSFFAYWGQGTLVTVSS

SEQ ID NO: 1023 - protein, 109 aa, Artificial Sequence; identical to SEQ ID NO: 363
  Synthetic

SEQ ID NO: 1024 - protein, 125 aa, Artificial Sequence
  Synthetic
EVQLVESGGGLVQPGGSLKLSCAASGFTFNIYAMNWVRQAPGKGLEWVARIRSKYNNYATYYADSVKSRFTISRDDSKNTAYLQMNNLKTEDTAVYYCLRHGNFGNSYVSFFAYWGQGTLVTVSS

SEQ ID NO: 1025 - protein, 109 aa, Artificial Sequence; identical to SEQ ID NO: 363
  Synthetic

SEQ ID NO: 1026 - protein, 5 aa, Artificial Sequence
  Synthetic
IYAIN

SEQ ID NO: 1027 - protein, 19 aa, Artificial Sequence
  Synthetic
RIRSKYNNYATYYADAVKS

SEQ ID NO: 1028 - protein, 14 aa, Artificial Sequence
  Synthetic
AGNFGSSYVSFFAY

SEQ ID NO: 1029 - protein, 14 aa, Artificial Sequence
  Synthetic
GSSTGAVTSGYYPN

SEQ ID NO: 1030 - protein, 7 aa, Artificial Sequence
  Synthetic
GTKFLAP

SEQ ID NO: 1031 - protein, 9 aa, Artificial Sequence
  Synthetic
ALWYSNRWV

SEQ ID NO: 1032 - protein, 125 aa, Artificial Sequence
  Synthetic
EVQLVESGGGLVQPGGSLKLSCAASGFTFNIYAINWVRQAPGKGLEWVARIRSKYNNYATYYADAVKSRFTISRDDSKNTVYLQMNNLKTEDTAVYYCARAGNFGSSYVSFFAYWGQGTLVTVSS

SEQ ID NO: 1033 - protein, 109 aa, Artificial Sequence; identical to SEQ ID NO: 479
  Synthetic

SEQ ID NO: 1034 - protein, 5 aa, Artificial Sequence
  Synthetic
IYAMN

SEQ ID NO: 1035 - protein, 19 aa, Artificial Sequence
  Synthetic
RIRSKYNNYATYYAEAVKG

SEQ ID NO: 1036 - protein, 14 aa, Artificial Sequence
  Synthetic
NENIGTSYVSFFAY

SEQ ID NO: 1037 - protein, 14 aa, Artificial Sequence
  Synthetic
GSSTGAVTSGYYPN

SEQ ID NO: 1038 - protein, 7 aa, Artificial Sequence
  Synthetic
GTKFLAP

SEQ ID NO: 1039 - protein, 9 aa, Artificial Sequence
  Synthetic
ALWYSNRWV

SEQ ID NO: 1040 - protein, 125 aa, Artificial Sequence
  Synthetic
EVQLVESGGGLVQPGGSLKLSCAASGFTFNIYAMNWVRQAPGKGLEWVARIRSKYNNYATYYAEAVKGRFTISRDDSKNTVYLQMNNLKTEDTAVYYCVRNENIGTSYVSFFAYWGQGTLVTVSS

SEQ ID NO: 1041 - protein, 109 aa, Artificial Sequence; identical to SEQ ID NO: 487
  Synthetic

SEQ ID NO: 1042 - protein, 5 aa, Artificial Sequence
  Synthetic
IYAMN

SEQ ID NO: 1043 - protein, 19 aa, Artificial Sequence
  Synthetic
RIRSKYNNYATYYADAVKS

SEQ ID NO: 1044 - protein, 14 aa, Artificial Sequence
  Synthetic
AGNFGSSYVSFFAY

SEQ ID NO: 1045 - protein, 14 aa, Artificial Sequence
  Synthetic
GSSTGAVTSGYYPN

SEQ ID NO: 1046 - protein, 7 aa, Artificial Sequence
  Synthetic
GTKFLAP

SEQ ID NO: 1047 - protein, 9 aa, Artificial Sequence
  Synthetic
ALYYSNRWV

SEQ ID NO: 1048 - protein, 125 aa, Artificial Sequence
  Synthetic
EVQLVESGGGLVQPGGSLKLSCAASGFTFNIYAMNWVRQAPGKGMEWVARIRSKYNNYATYYADAVKSRFTISRDDSKNTLYLQMNNLKTEDTAVYYCVRAGNFGSSYVSFFAYWGQGTLVTVSS

SEQ ID NO: 1049 - protein, 109 aa, Artificial Sequence; identical to SEQ ID NO: 495
  Synthetic

SEQ ID NO: 1050 - protein, 5 aa, Artificial Sequence
  Synthetic
IYAMN

SEQ ID NO: 1051 - protein, 19 aa, Artificial Sequence
  Synthetic
RIRSKYNNYATYYADAVKS

SEQ ID NO: 1052 - protein, 14 aa, Artificial Sequence
  Synthetic
AGNFGTSYVSFFAY

SEQ ID NO: 1053 - protein, 14 aa, Artificial Sequence
  Synthetic
GSSTGAVTSGYYPN

SEQ ID NO: 1054 - protein, 7 aa, Artificial Sequence
  Synthetic
GTKFLAP

SEQ ID NO: 1055 - protein, 9 aa, Artificial Sequence
  Synthetic
ALWYSNRWV

SEQ ID NO: 1056 - protein, 125 aa, Artificial Sequence
  Synthetic
EVQLVESGGGLVQPGGSLKLSCAASGFTFNIYAMNWVRQAPGKGMEWVARIRSKYNNYATYYADAVKSRFTISRDDSKNTLYLQMNNLKTEDTAVYYCVRAGNFGTSYVSFFAYWGQGTLVTVSS

SEQ ID NO: 1057 - protein, 109 aa, Artificial Sequence; identical to SEQ ID NO: 479
  Synthetic

SEQ ID NO: 1058 - protein, 5 aa, Artificial Sequence
  Synthetic
IYAIN

SEQ ID NO: 1059 - protein, 19 aa, Artificial Sequence
  Synthetic
RIRSKYNNYATYYADAVKS

SEQ ID NO: 1060 - protein, 14 aa, Artificial Sequence
  Synthetic
NANFGTSYVSFFAY

SEQ ID NO: 1061 - protein, 14 aa, Artificial Sequence
  Synthetic
GSSTGAVTSGYYPN

SEQ ID NO: 1062 - protein, 7 aa, Artificial Sequence
  Synthetic
GTKFLAP

SEQ ID NO: 1063 - protein, 9 aa, Artificial Sequence
  Synthetic
ALWYSNRWV

SEQ ID NO: 1064 - protein, 125 aa, Artificial Sequence
  Synthetic
EVQLVESGGGLVQPGGSLKLSCAASGFTFNIYAINWVREAPGKGLEWVARIRSKYNNYATYYADAVKSRFTISRDDSKNTAYLQMNNLKTEDTAVYYCVRNANFGTSYVSFFAYWGQGTLVTVSS

SEQ ID NO: 1065 - protein, 109 aa, Artificial Sequence; identical to SEQ ID NO: 379
  Synthetic

SEQ ID NO: 1066 - protein, 125 aa, Artificial Sequence; identical to SEQ ID NO: 928
  Synthetic

SEQ ID NO: 1067 - protein, 109 aa, Artificial Sequence; identical to SEQ ID NO: 513
  Synthetic

SEQ ID NO: 1068 - protein, 125 aa, Artificial Sequence; identical to SEQ ID NO: 928
  Synthetic

SEQ ID NO: 1069 - protein, 109 aa, Artificial Sequence; identical to SEQ ID NO: 515
  Synthetic

SEQ ID NO: 1070 - protein, 125 aa, Artificial Sequence; identical to SEQ ID NO: 928
  Synthetic

SEQ ID NO: 1071 - protein, 109 aa, Artificial Sequence; identical to SEQ ID NO: 517
  Synthetic

SEQ ID NO: 1072 - protein, 125 aa, Artificial Sequence; identical to SEQ ID NO: 928
  Synthetic

SEQ ID NO: 1073 - protein, 109 aa, Artificial Sequence; identical to SEQ ID NO: 519
  Synthetic

SEQ ID NO: 1074 - protein, 125 aa, Artificial Sequence; identical to SEQ ID NO: 928
  Synthetic

SEQ ID NO: 1075 - protein, 109 aa, Artificial Sequence; identical to SEQ ID NO: 521
  Synthetic

SEQ ID NO: 1076 - protein, 125 aa, Artificial Sequence; identical to SEQ ID NO: 928
  Synthetic

SEQ ID NO: 1077 - protein, 109 aa, Artificial Sequence; identical to SEQ ID NO: 377
  Synthetic

SEQ ID NO: 1078 - protein, 5 aa, Artificial Sequence
  Synthetic
IYAMN

SEQ ID NO: 1079 - protein, 19 aa, Artificial Sequence
  Synthetic
RIRSKYNNYATYYADSVKS

SEQ ID NO: 1080 - protein, 14 aa, Artificial Sequence
  Synthetic
HGNFGNSYVSFFAY

SEQ ID NO: 1081 - protein, 14 aa, Artificial Sequence
  Synthetic
GSSTGAVTSGYYPN

SEQ ID NO: 1082 - protein, 7 aa, Artificial Sequence
  Synthetic
GTKFLAP

SEQ ID NO: 1083 - protein, 9 aa, Artificial Sequence
  Synthetic
LLWYSNRWV

SEQ ID NO: 1084 - protein, 125 aa, Artificial Sequence; identical to SEQ ID NO: 928
  Synthetic

SEQ ID NO: 1085 - protein, 109 aa, Artificial Sequence; identical to SEQ ID NO: 531
  Synthetic

SEQ ID NO: 1086 - protein, 125 aa, Artificial Sequence; identical to SEQ ID NO: 928
  Synthetic

SEQ ID NO: 1087 - protein, 109 aa, Artificial Sequence; identical to SEQ ID NO: 469
  Synthetic

SEQ ID NO: 1088 - protein, 125 aa, Artificial Sequence; identical to SEQ ID NO: 928
  Synthetic

SEQ ID NO: 1089 - protein, 109 aa, Artificial Sequence; identical to SEQ ID NO: 471
  Synthetic

SEQ ID NO: 1090 - protein, 125 aa, Artificial Sequence; identical to SEQ ID NO: 928
  Synthetic

SEQ ID NO: 1091 - protein, 109 aa, Artificial Sequence; identical to SEQ ID NO: 537
  Synthetic

SEQ ID NO: 1092 - protein, 5 aa, Artificial Sequence
  Synthetic
IYAMN

SEQ ID NO: 1093 - protein, 19 aa, Artificial Sequence
  Synthetic
RIRSKYNNYATYYADSVKS

SEQ ID NO: 1094 - protein, 14 aa, Artificial Sequence
  Synthetic
HGNFGNSYVSFFAY

SEQ ID NO: 1095 - protein, 14 aa, Artificial Sequence
  Synthetic
GSSTGAVTSGYYPN

SEQ ID NO: 1096 - protein, 7 aa, Artificial Sequence
  Synthetic
GTKFLAP

SEQ ID NO: 1097 - protein, 9 aa, Artificial Sequence
  Synthetic
ALYYSNRWV

SEQ ID NO: 1098 - protein, 125 aa, Artificial Sequence; identical to SEQ ID NO: 928
  Synthetic

SEQ ID NO: 1099 - protein, 109 aa, Artificial Sequence; identical to SEQ ID NO: 545
  Synthetic

SEQ ID NO: 1100 - protein, 5 aa, Artificial Sequence
  Synthetic
VYAMN

SEQ ID NO: 1101 - protein, 19 aa, Artificial Sequence
  Synthetic
RIRSKYNNYATYYADSVKK

SEQ ID NO: 1102 - protein, 14 aa, Artificial Sequence
  Synthetic
HGNFGNSYISWWAY

SEQ ID NO: 1103 - protein, 14 aa, Artificial Sequence
  Synthetic
GSSTGAVTSGYYPN

SEQ ID NO: 1104 - protein, 7 aa, Artificial Sequence
  Synthetic
GTKFLAP

SEQ ID NO: 1105 - protein, 9 aa, Artificial Sequence
  Synthetic
ALWYSNRWV

SEQ ID NO: 1106 - protein, 125 aa, Artificial Sequence
  Synthetic
EVQLVESGGGLVQPGGSLKLSCAASGFTFNVYAMNWVRQAPGKGLEWVARIRSKYNNYATYYADSVKKRFTISRDDSKNTAYLQMNNLKTEDTAVYYCVRHGNFGNSYISWWAYWGQGTLVTVSS

SEQ ID NO: 1107 - protein, 109 aa, Artificial Sequence; identical to SEQ ID NO: 363
  Synthetic

SEQ ID NO: 1108 - protein, 125 aa, Artificial Sequence
  Synthetic
EVQLVESGGGLVQPGGSLKLSCAASGFTFNVYAMNWVRQAPGKGLEWVARIRSKYNNYATYYADSVKKRFTISRDDSKNTIYLQMNNLKTEDTAVYYCVRHGNFGNSYISWWAYWGQGTLVTVSS

SEQ ID NO: 1109 - protein, 109 aa, Artificial Sequence; identical to SEQ ID NO: 363
  Synthetic

SEQ ID NO: 1110 - protein, 125 aa, Artificial Sequence
  Synthetic
EVQLVESGGGLVQPGGSLKLSCAASGFTFNVYAMNWVRQAPGKGLEWVARIRSKYNNYATYYADSVKKRFTISRDDSKNTLYLQMNNLKTEDTAVYYCVRHGNFGNSYISWWAYWGQGTLVTVSS

SEQ ID NO: 1111 - protein, 109 aa, Artificial Sequence; identical to SEQ ID NO: 363
  Synthetic

SEQ ID NO: 1112 - protein, 125 aa, Artificial Sequence
  Synthetic
EVQLVESGGGLVQPGGSLKLSCAASGFTFNVYAMNWVRQAPGKGLEWVARIRSKYNNYATYYADSVKKRFTISRDDSKNTTYLQMNNLKTEDTAVYYCVRHGNFGNSYISWWAYWGQGTLVTVSS

SEQ ID NO: 1113 - protein, 109 aa, Artificial Sequence; identical to SEQ ID NO: 363
  Synthetic

SEQ ID NO: 1114 - protein, 125 aa, Artificial Sequence
  Synthetic
EVQLVESGGGLVQPGGSLKLSCAASGFTFNVYAMNWVRQAPGKGLEWVARIRSKYNNYATYYADSVKKRFTISRDDSKNTVYLQMNNLKTEDTAVYYCVRHGNFGNSYISWWAYWGQGTLVTVSS

SEQ ID NO: 1115 - protein, 109 aa, Artificial Sequence; identical to SEQ ID NO: 363
  Synthetic

SEQ ID NO: 1116 - protein, 125 aa, Artificial Sequence
  Synthetic
EVQLVESGGGLVQPGGSLKLSCAASGFTFNVYAMNWVRQAPGKGMEWVARIRSKYNNYATYYADSVKKRFTISRDDSKNTAYLQMNNLKTEDTAVYYCVRHGNFGNSYISWWAYWGQGTLVTVSS

SEQ ID NO: 1117 - protein, 109 aa, Artificial Sequence; identical to SEQ ID NO: 363
  Synthetic

SEQ ID NO: 1118 - protein, 125 aa, Artificial Sequence; identical to SEQ ID NO: 1116
  Synthetic

SEQ ID NO: 1119 - protein, 109 aa, Artificial Sequence; identical to SEQ ID NO: 375
  Synthetic

SEQ ID NO: 1120 - protein, 125 aa, Artificial Sequence; identical to SEQ ID NO: 1116
  Synthetic

SEQ ID NO: 1121 - protein, 109 aa, Artificial Sequence; identical to SEQ ID NO: 377
  Synthetic

SEQ ID NO: 1122 - protein, 125 aa, Artificial Sequence; identical to SEQ ID NO: 1116
  Synthetic

SEQ ID NO: 1123 - protein, 109 aa, Artificial Sequence; identical to SEQ ID NO: 379
  Synthetic

SEQ ID NO: 1124 - protein, 125 aa, Artificial Sequence
  Synthetic
EVQLVESGGGLVQPGGSLKLSCAASGFTFNVYAMNWVRQAPGKGVEWVARIRSKYNNYATYYADSVKKRFTISRDDSKNTAYLQMNNLKTEDTAVYYCVRHGNFGNSYISWWAYWGQGTLVTVSS

SEQ ID NO: 1125 - protein, 109 aa, Artificial Sequence; identical to SEQ ID NO: 363
  Synthetic

SEQ ID NO: 1126 - protein, 125 aa, Artificial Sequence; identical to SEQ ID NO: 1124
  Synthetic

SEQ ID NO: 1127 - protein, 109 aa, Artificial Sequence; identical to SEQ ID NO: 383
  Synthetic

SEQ ID NO: 1128 - protein, 125 aa, Artificial Sequence; identical to SEQ ID NO: 1124
  Synthetic

SEQ ID NO: 1129 - protein, 109 aa, Artificial Sequence; identical to SEQ ID NO: 385
  Synthetic

SEQ ID NO: 1130 - protein, 5 aa, Artificial Sequence
  Synthetic
VYAFN

SEQ ID NO: 1131 - protein, 19 aa, Artificial Sequence
  Synthetic
RIRSKYNNYATYYADSVKK

SEQ ID NO: 1132 - protein, 14 aa, Artificial Sequence
  Synthetic
HGNFGNSYISWWAY

SEQ ID NO: 1133 - protein, 14 aa, Artificial Sequence
  Synthetic
GSSTGAVTSGYYPN

SEQ ID NO: 1134 - protein, 7 aa, Artificial Sequence
  Synthetic
GTKFLAP

SEQ ID NO: 1135 - protein, 9 aa, Artificial Sequence
  Synthetic
ALWYSNRWV

SEQ ID NO: 1136 - protein, 125 aa, Artificial Sequence
  Synthetic
EVQLVESGGGLVQPGGSLKLSCAASGFTFNVYAFNWVRQAPGKGLEWVARIRSKYNNYATYYADSVKKRFTISRDDSKNTVYLQMNNLKTEDTAVYYCVRHGNFGNSYISWWAYWGQGTLVTVSS

SEQ ID NO: 1137 - protein, 109 aa, Artificial Sequence; identical to SEQ ID NO: 363
  Synthetic

SEQ ID NO: 1138 - protein, 5 aa, Artificial Sequence
  Synthetic
VYAIN

SEQ ID NO: 1139 - protein, 19 aa, Artificial Sequence
  Synthetic
RIRSKYNNYATYYADSVKK

SEQ ID NO: 1140 - protein, 14 aa, Artificial Sequence
  Synthetic
HGNFGNSYISWWAY

SEQ ID NO: 1141 - protein, 14 aa, Artificial Sequence
  Synthetic
GSSTGAVTSGYYPN

SEQ ID NO: 1142 - protein, 7 aa, Artificial Sequence
  Synthetic
GTKFLAP

SEQ ID NO: 1143 - protein, 9 aa, Artificial Sequence
  Synthetic
ALWYSNRWV

SEQ ID NO: 1144 - protein, 125 aa, Artificial Sequence
  Synthetic
EVQLVESGGGLVQPGGSLKLSCAASGFTFNVYAINWVRQAPGKGLEWVARIRSKYNNYATYYADSVKKRFTISRDDSKNTAYLQMNNLKTEDTAVYYCVRHGNFGNSYISWWAYWGQGTLVTVSS

SEQ ID NO: 1145 - protein, 109 aa, Artificial Sequence; identical to SEQ ID NO: 363
  Synthetic

SEQ ID NO: 1146 - protein, 125 aa, Artificial Sequence
  Synthetic
EVQLVESGGGLVQPGGSLKLSCAASGFTFNVYAINWVRQAPGKGLEWVARIRSKYNNYATYYADSVKKRFTISRDDSKNTLYLQMNNLKTEDTAVYYCVRHGNFGNSYISWWAYWGQGTLVTVSS

SEQ ID NO: 1147 - protein, 109 aa, Artificial Sequence; identical to SEQ ID NO: 363
  Synthetic

SEQ ID NO: 1148 - protein, 125 aa, Artificial Sequence
  Synthetic
EVQLVESGGGLVQPGGSLKLSCAASGFTFNVYAINWVRQAPGKGLEWVARIRSKYNNYATYYADSVKKRFTISRDDSKNTVYLQMNNLKTEDTAVYYCVRHGNFGNSYISWWAYWGQGTLVTVSS

SEQ ID NO: 1149 - protein, 109 aa, Artificial Sequence; identical to SEQ ID NO: 363
  Synthetic

SEQ ID NO: 1150 - protein, 125 aa, Artificial Sequence; identical to SEQ ID NO: 1148
  Synthetic

SEQ ID NO: 1151 - protein, 109 aa, Artificial Sequence; identical to SEQ ID NO: 375
  Synthetic

SEQ ID NO: 1152 - protein, 125 aa, Artificial Sequence; identical to SEQ ID NO: 1148
  Synthetic

SEQ ID NO: 1153 - protein, 109 aa, Artificial Sequence; identical to SEQ ID NO: 377
  Synthetic

SEQ ID NO: 1154 - protein, 125 aa, Artificial Sequence
  Synthetic
EVQLVESGGGLVQPGGSLKLSCAASGFTFNVYAINWVRQAPGKGVEWVARIRSKYNNYATYYADSVKKRFTISRDDSKNTVYLQMNNLKTEDTAVYYCVRHGNFGNSYISWWAYWGQGTLVTVSS

SEQ ID NO: 1155 - protein, 109 aa, Artificial Sequence; identical to SEQ ID NO: 411
  Synthetic

SEQ ID NO: 1156 - protein, 125 aa, Artificial Sequence; identical to SEQ ID NO: 1144
  Synthetic

SEQ ID NO: 1157 - protein, 109 aa, Artificial Sequence; identical to SEQ ID NO: 375
  Synthetic

SEQ ID NO: 1158 - protein, 125 aa, Artificial Sequence
  Synthetic
EVQLVESGGGLVQPGGSLKLSCAASGFTFNVYAINWVREAPGKGLEWVARIRSKYNNYATYYADSVKKRFTISRDDSKNTVYLQMNNLKTEDTAVYYCVRHGNFGNSYISWWAYWGQGTLVTVSS

SEQ ID NO: 1159 - protein, 109 aa, Artificial Sequence; identical to SEQ ID NO: 375
  Synthetic

SEQ ID NO: 1160 - protein, 5 aa, Artificial Sequence
  Synthetic
VYAVN

SEQ ID NO: 1161 - protein, 19 aa, Artificial Sequence
  Synthetic
RIRSKYNNYATYYADSVKK

SEQ ID NO: 1162 - protein, 14 aa, Artificial Sequence
  Synthetic
HGNFGNSYISWWAY

SEQ ID NO: 1163 - protein, 14 aa, Artificial Sequence
  Synthetic
GSSTGAVTSGYYPN

SEQ ID NO: 1164 - protein, 7 aa, Artificial Sequence
  Synthetic
GTKFLAP

SEQ ID NO: 1165 - protein, 9 aa, Artificial Sequence
  Synthetic
ALWYSNRWV

SEQ ID NO: 1166 - protein, 125 aa, Artificial Sequence
  Synthetic
EVQLVESGGGLVQPGGSLKLSCAASGFTFNVYAVNWVRQAPGKGLEWVARIRSKYNNYATYYADSVKKRFTISRDDSKNTAYLQMNNLKTEDTAVYYCVRHGNFGNSYISWWAYWGQGTLVTVSS

SEQ ID NO: 1167 - protein, 109 aa, Artificial Sequence; identical to SEQ ID NO: 363
  Synthetic

SEQ ID NO: 1168 - protein, 125 aa, Artificial Sequence
  Synthetic
EVQLVESGGGLVQPGGSLKLSCAASGFTFNVYAMNWVRDAPGKGLEWVARIRSKYNNYATYYADSVKKRFTISRDDSKNTAYLQMNNLKTEDTAVYYCVRHGNFGNSYISWWAYWGQGTLVTVSS

SEQ ID NO: 1169 - protein, 109 aa, Artificial Sequence; identical to SEQ ID NO: 363
  Synthetic

SEQ ID NO: 1170 - protein, 125 aa, Artificial Sequence; identical to SEQ ID NO: 1168
  Synthetic

SEQ ID NO: 1171 - protein, 109 aa, Artificial Sequence; identical to SEQ ID NO: 375
  Synthetic

SEQ ID NO: 1172 - protein, 125 aa, Artificial Sequence; identical to SEQ ID NO: 1168
  Synthetic

SEQ ID NO: 1173 - protein, 109 aa, Artificial Sequence; identical to SEQ ID NO: 429
  Synthetic

SEQ ID NO: 1174 - protein, 125 aa, Artificial Sequence; identical to SEQ ID NO: 1168
  Synthetic

SEQ ID NO: 1175 - protein, 109 aa, Artificial Sequence; identical to SEQ ID NO: 377
  Synthetic

SEQ ID NO: 1176 - protein, 125 aa, Artificial Sequence; identical to SEQ ID NO: 1168
  Synthetic

SEQ ID NO: 1177 - protein, 109 aa, Artificial Sequence; identical to SEQ ID NO: 379
  Synthetic

SEQ ID NO: 1178 - protein, 125 aa, Artificial Sequence; identical to SEQ ID NO: 1168
  Synthetic

SEQ ID NO: 1179 - protein, 109 aa, Artificial Sequence; identical to SEQ ID NO: 435
  Synthetic

SEQ ID NO: 1180 - protein, 125 aa, Artificial Sequence; identical to SEQ ID NO: 1168
  Synthetic

SEQ ID NO: 1181 - protein, 109 aa, Artificial Sequence; identical to SEQ ID NO: 437
  Synthetic

SEQ ID NO: 1182 - protein, 125 aa, Artificial Sequence
  Synthetic
EVQLVESGGGLVQPGGSLKLSCAASGFTFNVYAMNWVREAPGKGLEWVARIRSKYNNYATYYADSVKKRFTISRDDSKNTAYLQMNNLKTEDTAVYYCVRHGNFGNSYISWWAYWGQGTLVTVSS

SEQ ID NO: 1183 - protein, 109 aa, Artificial Sequence; identical to SEQ ID NO: 363
  Synthetic

SEQ ID NO: 1184 - protein, 125 aa, Artificial Sequence; identical to SEQ ID NO: 1182
  Synthetic

SEQ ID NO: 1185 - protein, 109 aa, Artificial Sequence; identical to SEQ ID NO: 375
  Synthetic

SEQ ID NO: 1186 - protein, 125 aa, Artificial Sequence; identical to SEQ ID NO: 1182
  Synthetic

SEQ ID NO: 1187 - protein, 109 aa, Artificial Sequence; identical to SEQ ID NO: 429
  Synthetic

SEQ ID NO: 1188 - protein, 125 aa, Artificial Sequence; identical to SEQ ID NO: 1182
  Synthetic

SEQ ID NO: 1189 - protein, 109 aa, Artificial Sequence; identical to SEQ ID NO: 377
  Synthetic

SEQ ID NO: 1190 - protein, 125 aa, Artificial Sequence; identical to SEQ ID NO: 1182
  Synthetic

SEQ ID NO: 1191 - protein, 109 aa, Artificial Sequence; identical to SEQ ID NO: 379
  Synthetic

SEQ ID NO: 1192 - protein, 125 aa, Artificial Sequence; identical to SEQ ID NO: 1182
  Synthetic

SEQ ID NO: 1193 - protein, 109 aa, Artificial Sequence; identical to SEQ ID NO: 435
  Synthetic

SEQ ID NO: 1194 - protein, 125 aa, Artificial Sequence; identical to SEQ ID NO: 1182
  Synthetic

SEQ ID NO: 1195 - protein, 109 aa, Artificial Sequence; identical to SEQ ID NO: 437
  Synthetic

SEQ ID NO: 1196 - protein, 125 aa, Artificial Sequence
  Synthetic
EVQLVESGGGLVQPGGSLKLSCAASGFTFNVYAMNWVRKAPGKGLEWVARIRSKYNNYATYYADSVKKRFTISRDDSKNTAYLQMNNLKTEDTAVYYCVRHGNFGNSYISWWAYWGQGTLVTVSS

SEQ ID NO: 1197 - protein, 109 aa, Artificial Sequence; identical to SEQ ID NO: 363
  Synthetic

SEQ ID NO: 1198 - protein, 125 aa, Artificial Sequence
  Synthetic
EVQLVESGGGLVQPGGSLKLSCAASGFTFNVYAMNWVRRAPGKGLEWVARIRSKYNNYATYYADSVKKRFTISRDDSKNTAYLQMNNLKTEDTAVYYCVRHGNFGNSYISWWAYWGQGTLVTVSS

SEQ ID NO: 1199 - protein, 109 aa, Artificial Sequence; identical to SEQ ID NO: 363
  Synthetic

SEQ ID NO: 1200 - protein, 125 aa, Artificial Sequence
  Synthetic
EVQLVESGGGLVQPGGSLKLSCAASGFTFNVYAMNWVRQAPGKGLEWVARIRSKYNNYATYYADSVKKRFTISRDDSKNTAYLQMNNLKTEDTAVYYCARHGNFGNSYISWWAYWGQGTLVTVSS

SEQ ID NO: 1201 - protein, 109 aa, Artificial Sequence; identical to SEQ ID NO: 363
  Synthetic

SEQ ID NO: 1202 - protein, 125 aa, Artificial Sequence
  Synthetic
EVQLVESGGGLVQPGGSLKLSCAASGFTFNVYAMNWVRQAPGKGLEWVARIRSKYNNYATYYADSVKKRFTISRDDSKNTAYLQMNNLKTEDTAVYYCLRHGNFGNSYISWWAYWGQGTLVTVSS

SEQ ID NO: 1203 - protein, 109 aa, Artificial Sequence; identical to SEQ ID NO: 363
  Synthetic

SEQ ID NO: 1204 - protein, 5 aa, Artificial Sequence
  Synthetic
VYAMN

SEQ ID NO: 1205 - protein, 19 aa, Artificial Sequence
  Synthetic
RIRSKYNNYATYYADSVKK

SEQ ID NO: 1206 - protein, 14 aa, Artificial Sequence
  Synthetic
HGNFGNSYISWFAY

SEQ ID NO: 1207 - protein, 14 aa, Artificial Sequence
  Synthetic
GSSTGAVTSGYYPN

SEQ ID NO: 1208 - protein, 7 aa, Artificial Sequence
  Synthetic
GTKFLAP

SEQ ID NO: 1209 - protein, 9 aa, Artificial Sequence
  Synthetic
ALWYSNRWV

SEQ ID NO: 1210 - protein, 125 aa, Artificial Sequence
  Synthetic
EVQLVESGGGLVQPGGSLKLSCAASGFTFNVYAMNWVRQAPGKGLEWVARIRSKYNNYATYYADSVKKRFTISRDDSKNTAYLQMNNLKTEDTAVYYCVRHGNFGNSYISWFAYWGQGTLVTVSS

SEQ ID NO: 1211 - protein, 109 aa, Artificial Sequence; identical to SEQ ID NO: 363
  Synthetic

SEQ ID NO: 1212 - protein, 125 aa, Artificial Sequence; identical to SEQ ID NO: 1210
  Synthetic

SEQ ID NO: 1213 - protein, 109 aa, Artificial Sequence; identical to SEQ ID NO: 469
  Synthetic

SEQ ID NO: 1214 - protein, 125 aa, Artificial Sequence; identical to SEQ ID NO: 1210
  Synthetic

SEQ ID NO: 1215 - protein, 109 aa, Artificial Sequence; identical to SEQ ID NO: 471
  Synthetic

SEQ ID NO: 1216 - protein, 5 aa, Artificial Sequence
  Synthetic
VYAIN

SEQ ID NO: 1217 - protein, 19 aa, Artificial Sequence
  Synthetic
RIRSKYNNYATYYADAVKK

SEQ ID NO: 1218 - protein, 14 aa, Artificial Sequence
  Synthetic
AGNFGSSYISWWAY

SEQ ID NO: 1219 - protein, 14 aa, Artificial Sequence
  Synthetic
GSSTGAVTSGYYPN

SEQ ID NO: 1220 - protein, 7 aa, Artificial Sequence
  Synthetic
GTKFLAP

SEQ ID NO: 1221 - protein, 9 aa, Artificial Sequence
  Synthetic
ALWYSNRWV

SEQ ID NO: 1222 - protein, 125 aa, Artificial Sequence
  Synthetic
EVQLVESGGGLVQPGGSLKLSCAASGFTFNVYAINWVRQAPGKGLEWVARIRSKYNNYATYYADAVKKRFTISRDDSKNTVYLQMNNLKTEDTAVYYCARAGNFGSSYISWWAYWGQGTLVTVSS

SEQ ID NO: 1223 - protein, 109 aa, Artificial Sequence; identical to SEQ ID NO: 479
  Synthetic

SEQ ID NO: 1224 - protein, 5 aa, Artificial Sequence
  Synthetic
VYAMN

SEQ ID NO: 1225 - protein, 19 aa, Artificial Sequence
  Synthetic
RIRSKYNNYATYYAEAVKG

SEQ ID NO: 1226 - protein, 14 aa, Artificial Sequence
  Synthetic
NENIGTSYISWWAY

SEQ ID NO: 1227 - protein, 14 aa, Artificial Sequence
  Synthetic
GSSTGAVTSGYYPN

SEQ ID NO: 1228 - protein, 7 aa, Artificial Sequence
  Synthetic
GTKFLAP

SEQ ID NO: 1229 - protein, 9 aa, Artificial Sequence
  Synthetic
ALWYSNRWV

SEQ ID NO: 1230 - protein, 125 aa, Artificial Sequence
  Synthetic
EVQLVESGGGLVQPGGSLKLSCAASGFTFNVYAMNWVRQAPGKGLEWVARIRSKYNNYATYYAEAVKGRFTISRDDSKNTVYLQMNNLKTEDTAVYYCVRNENIGTSYISWWAYWGQGTLVTVSS

SEQ ID NO: 1231 - protein, 109 aa, Artificial Sequence; identical to SEQ ID NO: 487
  Synthetic

SEQ ID NO: 1232 - protein, 5 aa, Artificial Sequence
  Synthetic
VYAMN

SEQ ID NO: 1233 - protein, 19 aa, Artificial Sequence
  Synthetic
RIRSKYNNYATYYADAVKK

SEQ ID NO: 1234 - protein, 14 aa, Artificial Sequence
  Synthetic
AGNFGSSYISWFAY

SEQ ID NO: 1235 - protein, 14 aa, Artificial Sequence
  Synthetic
GSSTGAVTSGYYPN

SEQ ID NO: 1236 - protein, 7 aa, Artificial Sequence
  Synthetic
GTKFLAP

SEQ ID NO: 1237 - protein, 9 aa, Artificial Sequence
  Synthetic
ALYYSNRWV

SEQ ID NO: 1238 - protein, 125 aa, Artificial Sequence
  Synthetic
EVQLVESGGGLVQPGGSLKLSCAASGFTFNVYAMNWVRQAPGKGMEWVARIRSKYNNYATYYADAVKKRFTISRDDSKNTLYLQMNNLKTEDTAVYYCVRAGNFGSSYISWFAYWGQGTLVTVSS

SEQ ID NO: 1239 - protein, 109 aa, Artificial Sequence; identical to SEQ ID NO: 495
  Synthetic

SEQ ID NO: 1240 - protein, 5 aa, Artificial Sequence
  Synthetic
VYAMN

SEQ ID NO: 1241 - protein, 19 aa, Artificial Sequence
  Synthetic
RIRSKYNNYATYYADAVKK

SEQ ID NO: 1242 - protein, 14 aa, Artificial Sequence
  Synthetic
AGNFGTSYISWWAY

SEQ ID NO: 1243 - protein, 14 aa, Artificial Sequence
  Synthetic
GSSTGAVTSGYYPN

SEQ ID NO: 1244 - protein, 7 aa, Artificial Sequence
  Synthetic
GTKFLAP

SEQ ID NO: 1245 - protein, 9 aa, Artificial Sequence
  Synthetic
ALWYSNRWV

SEQ ID NO: 1246 - protein, 125 aa, Artificial Sequence
  Synthetic
EVQLVESGGGLVQPGGSLKLSCAASGFTFNVYAMNWVRQAPGKGMEWVARIRSKYNNYATYYADAVKKRFTISRDDSKNTLYLQMNNLKTEDTAVYYCVRAGNFGTSYISWWAYWGQGTLVTVSS

SEQ ID NO: 1247 - protein, 109 aa, Artificial Sequence; identical to SEQ ID NO: 479
  Synthetic

SEQ ID NO: 1248 - protein, 5 aa, Artificial Sequence
  Synthetic
VYAIN

SEQ ID NO: 1249 - protein, 19 aa, Artificial Sequence
  Synthetic
RIRSKYNNYATYYADAVKK

SEQ ID NO: 1250 - protein, 14 aa, Artificial Sequence
  Synthetic
NANFGTSYISWFAY

SEQ ID NO: 1251 - protein, 14 aa, Artificial Sequence
  Synthetic
GSSTGAVTSGYYPN

SEQ ID NO: 1252 - protein, 7 aa, Artificial Sequence
  Synthetic
GTKFLAP

SEQ ID NO: 1253 - protein, 9 aa, Artificial Sequence
  Synthetic
ALWYSNRWV

SEQ ID NO: 1254 - protein, 125 aa, Artificial Sequence
  Synthetic
EVQLVESGGGLVQPGGSLKLSCAASGFTFNVYAINWVREAPGKGLEWVARIRSKYNNYATYYADAVKKRFTISRDDSKNTAYLQMNNLKTEDTAVYYCVRNANFGTSYISWFAYWGQGTLVTVSS

SEQ ID NO: 1255 - protein, 109 aa, Artificial Sequence; identical to SEQ ID NO: 379
  Synthetic

SEQ ID NO: 1256 - protein, 125 aa, Artificial Sequence; identical to SEQ ID NO: 1106
  Synthetic

SEQ ID NO: 1257 - protein, 109 aa, Artificial Sequence; identical to SEQ ID NO: 513
  Synthetic

SEQ ID NO: 1258 - protein, 125 aa, Artificial Sequence; identical to SEQ ID NO: 1106
  Synthetic

SEQ ID NO: 1259 - protein, 109 aa, Artificial Sequence; identical to SEQ ID NO: 515
  Synthetic

SEQ ID NO: 1260 - protein, 125 aa, Artificial Sequence; identical to SEQ ID NO: 1106
  Synthetic

SEQ ID NO: 1261 - protein, 109 aa, Artificial Sequence; identical to SEQ ID NO: 517
  Synthetic

SEQ ID NO: 1262 - protein, 125 aa, Artificial Sequence; identical to SEQ ID NO: 1106
  Synthetic

SEQ ID NO: 1263 - protein, 109 aa, Artificial Sequence; identical to SEQ ID NO: 519
  Synthetic

SEQ ID NO: 1264 - protein, 125 aa, Artificial Sequence; identical to SEQ ID NO: 1106
  Synthetic

SEQ ID NO: 1265 - protein, 109 aa, Artificial Sequence; identical to SEQ ID NO: 521
  Synthetic

SEQ ID NO: 1266 - protein, 125 aa, Artificial Sequence; identical to SEQ ID NO: 1106
  Synthetic

SEQ ID NO: 1267 - protein, 109 aa, Artificial Sequence; identical to SEQ ID NO: 377
  Synthetic

SEQ ID NO: 1268 - protein, 5 aa, Artificial Sequence
  Synthetic
VYAMN

SEQ ID NO: 1269 - protein, 19 aa, Artificial Sequence
  Synthetic
RIRSKYNNYATYYADSVKK

SEQ ID NO: 1270 - protein, 14 aa, Artificial Sequence
  Synthetic
HGNFGNSYISWWAY

SEQ ID NO: 1271 - protein, 14 aa, Artificial Sequence
  Synthetic
GSSTGAVTSGYYPN

SEQ ID NO: 1272 - protein, 7 aa, Artificial Sequence
  Synthetic
GTKFLAP

SEQ ID NO: 1273 - protein, 9 aa, Artificial Sequence
  Synthetic
LLWYSNRWV

SEQ ID NO: 1274 - protein, 125 aa, Artificial Sequence; identical to SEQ ID NO: 1106
  Synthetic

SEQ ID NO: 1275 - protein, 109 aa, Artificial Sequence; identical to SEQ ID NO: 531
  Synthetic

SEQ ID NO: 1276 - protein, 125 aa, Artificial Sequence; identical to SEQ ID NO: 1106
  Synthetic

SEQ ID NO: 1277 - protein, 109 aa, Artificial Sequence; identical to SEQ ID NO: 469
  Synthetic

SEQ ID NO: 1278 - protein, 125 aa, Artificial Sequence; identical to SEQ ID NO: 1106
  Synthetic

SEQ ID NO: 1279 - protein, 109 aa, Artificial Sequence; identical to SEQ ID NO: 471
  Synthetic

SEQ ID NO: 1280 - protein, 125 aa, Artificial Sequence; identical to SEQ ID NO: 1106
  Synthetic

SEQ ID NO: 1281 - protein, 109 aa, Artificial Sequence; identical to SEQ ID NO: 537
  Synthetic

SEQ ID NO: 1282 - protein, 5 aa, Artificial Sequence
  Synthetic
VYAMN

SEQ ID NO: 1283 - protein, 19 aa, Artificial Sequence
  Synthetic
RIRSKYNNYATYYADSVKK

SEQ ID NO: 1284 - protein, 14 aa, Artificial Sequence
  Synthetic
HGNFGNSYISWWAY

SEQ ID NO: 1285 - protein, 14 aa, Artificial Sequence
  Synthetic
GSSTGAVTSGYYPN

SEQ ID NO: 1286 - protein, 7 aa, Artificial Sequence
  Synthetic
GTKFLAP

SEQ ID NO: 1287 - protein, 9 aa, Artificial Sequence
  Synthetic
ALYYSNRWV

SEQ ID NO: 1288 - protein, 125 aa, Artificial Sequence; identical to SEQ ID NO: 1106
  Synthetic

SEQ ID NO: 1289 - protein, 109 aa, Artificial Sequence; identical to SEQ ID NO: 545
  Synthetic

SEQ ID NO: 1290 - protein, 5 aa, Artificial Sequence
  Synthetic
RYAMN

SEQ ID NO: 1291 - protein, 19 aa, Artificial Sequence
  Synthetic
RIRSKYNNYATYYADSVKG

SEQ ID NO: 1292 - protein, 14 aa, Artificial Sequence
  Synthetic
HGNFGNSYLSYFAY

SEQ ID NO: 1293 - protein, 14 aa, Artificial Sequence
  Synthetic
GSSTGAVTSGYYPN

SEQ ID NO: 1294 - protein, 7 aa, Artificial Sequence
  Synthetic
GTKFLAP

SEQ ID NO: 1295 - protein, 9 aa, Artificial Sequence
  Synthetic
ALWYSNRWV

SEQ ID NO: 1296 - protein, 125 aa, Artificial Sequence
  Synthetic
EVQLVESGGGLVQPGGSLKLSCAASGFTFNRYAMNWVRQAPGKGLEWVARIRSKYNNYATYYADSVKGRFTISRDDSKNTAYLQMNNLKTEDTAVYYCVRHGNFGNSYLSYFAYWGQGTLVTVSS

SEQ ID NO: 1297 - protein, 109 aa, Artificial Sequence; identical to SEQ ID NO: 363
  Synthetic

SEQ ID NO: 1298 - protein, 125 aa, Artificial Sequence
  Synthetic
EVQLVESGGGLVQPGGSLKLSCAASGFTFNRYAMNWVRQAPGKGLEWVARIRSKYNNYATYYADSVKGRFTISRDDSKNTIYLQMNNLKTEDTAVYYCVRHGNFGNSYLSYFAYWGQGTLVTVSS

SEQ ID NO: 1299 - protein, 109 aa, Artificial Sequence; identical to SEQ ID NO: 363
  Synthetic

SEQ ID NO: 1300 - protein, 125 aa, Artificial Sequence
  Synthetic
EVQLVESGGGLVQPGGSLKLSCAASGFTFNRYAMNWVRQAPGKGLEWVARIRSKYNNYATYYADSVKGRFTISRDDSKNTLYLQMNNLKTEDTAVYYCVRHGNFGNSYLSYFAYWGQGTLVTVSS

SEQ ID NO: 1301 - protein, 109 aa, Artificial Sequence; identical to SEQ ID NO: 363
  Synthetic

SEQ ID NO: 1302 - protein, 125 aa, Artificial Sequence
  Synthetic
EVQLVESGGGLVQPGGSLKLSCAASGFTFNRYAMNWVRQAPGKGLEWVARIRSKYNNYATYYADSVKGRFTISRDDSKNTTYLQMNNLKTEDTAVYYCVRHGNFGNSYLSYFAYWGQGTLVTVSS

SEQ ID NO: 1303 - protein, 109 aa, Artificial Sequence; identical to SEQ ID NO: 363
  Synthetic

SEQ ID NO: 1304 - protein, 125 aa, Artificial Sequence
  Synthetic
EVQLVESGGGLVQPGGSLKLSCAASGFTFNRYAMNWVRQAPGKGLEWVARIRSKYNNYATYYADSVKGRFTISRDDSKNTVYLQMNNLKTEDTAVYYCVRHGNFGNSYLSYFAYWGQGTLVTVSS

SEQ ID NO: 1305 - protein, 109 aa, Artificial Sequence; identical to SEQ ID NO: 363
  Synthetic

SEQ ID NO: 1306 - protein, 125 aa, Artificial Sequence
  Synthetic
EVQLVESGGGLVQPGGSLKLSCAASGFTFNRYAMNWVRQAPGKGMEWVARIRSKYNNYATYYADSVKGRFTISRDDSKNTAYLQMNNLKTEDTAVYYCVRHGNFGNSYLSYFAYWGQGTLVTVSS

SEQ ID NO: 1307 - protein, 109 aa, Artificial Sequence; identical to SEQ ID NO: 363
  Synthetic

SEQ ID NO: 1308 - protein, 125 aa, Artificial Sequence; identical to SEQ ID NO: 1306
  Synthetic

SEQ ID NO: 1309 - protein, 109 aa, Artificial Sequence; identical to SEQ ID NO: 375
  Synthetic

SEQ ID NO: 1310 - protein, 125 aa, Artificial Sequence; identical to SEQ ID NO: 1306
  Synthetic

SEQ ID NO: 1311 - protein, 109 aa, Artificial Sequence; identical to SEQ ID NO: 377
  Synthetic

SEQ ID NO: 1312 - protein, 125 aa, Artificial Sequence; identical to SEQ ID NO: 1306
  Synthetic

SEQ ID NO: 1313 - protein, 109 aa, Artificial Sequence; identical to SEQ ID NO: 379
  Synthetic

SEQ ID NO: 1314 - protein, 125 aa, Artificial Sequence
  Synthetic
EVQLVESGGGLVQPGGSLKLSCAASGFTFNRYAMNWVRQAPGKGVEWVARIRSKYNNYATYYADSVKGRFTISRDDSKNTAYLQMNNLKTEDTAVYYCVRHGNFGNSYLSYFAYWGQGTLVTVSS

SEQ ID NO: 1315 - protein, 109 aa, Artificial Sequence; identical to SEQ ID NO: 363
  Synthetic

SEQ ID NO: 1316 - protein, 125 aa, Artificial Sequence; identical to SEQ ID NO: 1314
  Synthetic

SEQ ID NO: 1317 - protein, 109 aa, Artificial Sequence; identical to SEQ ID NO: 383
  Synthetic

SEQ ID NO: 1318 - protein, 125 aa, Artificial Sequence; identical to SEQ ID NO: 1314
  Synthetic

SEQ ID NO: 1319 - protein, 109 aa, Artificial Sequence; identical to SEQ ID NO: 385
  Synthetic

SEQ ID NO: 1320 - protein, 5 aa, Artificial Sequence
  Synthetic
RYAFN

SEQ ID NO: 1321 - protein, 19 aa, Artificial Sequence
  Synthetic
RIRSKYNNYATYYADSVKG

SEQ ID NO: 1322 - protein, 14 aa, Artificial Sequence
  Synthetic
HGNFGNSYLSYFAY

SEQ ID NO: 1323 - protein, 14 aa, Artificial Sequence
  Synthetic
GSSTGAVTSGYYPN

SEQ ID NO: 1324 - protein, 7 aa, Artificial Sequence
  Synthetic
GTKFLAP

SEQ ID NO: 1325 - protein, 9 aa, Artificial Sequence
  Synthetic
ALWYSNRWV

SEQ ID NO: 1326 - protein, 125 aa, Artificial Sequence
  Synthetic
EVQLVESGGGLVQPGGSLKLSCAASGFTFNRYAFNWVRQAPGKGLEWVARIRSKYNNYATYYADSVKGRFTISRDDSKNTVYLQMNNLKTEDTAVYYCVRHGNFGNSYLSYFAYWGQGTLVTVSS

SEQ ID NO: 1327 - protein, 109 aa, Artificial Sequence; identical to SEQ ID NO: 363
  Synthetic

SEQ ID NO: 1328 - protein, 5 aa, Artificial Sequence
  Synthetic
RYAIN

SEQ ID NO: 1329 - protein, 19 aa, Artificial Sequence
  Synthetic
RIRSKYNNYATYYADSVKG

SEQ ID NO: 1330 - protein, 14 aa, Artificial Sequence
  Synthetic
HGNFGNSYLSYFAY

SEQ ID NO: 1331 - protein, 14 aa, Artificial Sequence
  Synthetic
GSSTGAVTSGYYPN

SEQ ID NO: 1332 - protein, 7 aa, Artificial Sequence
  Synthetic
GTKFLAP

SEQ ID NO: 1333 - protein, 9 aa, Artificial Sequence
  Synthetic
ALWYSNRWV

SEQ ID NO: 1334 - protein, 125 aa, Artificial Sequence
  Synthetic
EVQLVESGGGLVQPGGSLKLSCAASGFTFNRYAINWVRQAPGKGLEWVARIRSKYNNYATYYADSVKGRFTISRDDSKNTAYLQMNNLKTEDTAVYYCVRHGNFGNSYLSYFAYWGQGTLVTVSS

SEQ ID NO: 1335 - protein, 109 aa, Artificial Sequence; identical to SEQ ID NO: 363
  Synthetic

SEQ ID NO: 1336 - protein, 125 aa, Artificial Sequence
  Synthetic
EVQLVESGGGLVQPGGSLKLSCAASGFTFNRYAINWVRQAPGKGLEWVARIRSKYNNYATYYADSVKGRFTISRDDSKNTLYLQMNNLKTEDTAVYYCVRHGNFGNSYLSYFAYWGQGTLVTVSS

SEQ ID NO: 1337 - protein, 109 aa, Artificial Sequence; identical to SEQ ID NO: 363
  Synthetic

SEQ ID NO: 1338 - protein, 125 aa, Artificial Sequence
  Synthetic
EVQLVESGGGLVQPGGSLKLSCAASGFTFNRYAINWVRQAPGKGLEWVARIRSKYNNYATYYADSVKGRFTISRDDSKNTVYLQMNNLKTEDTAVYYCVRHGNFGNSYLSYFAYWGQGTLVTVSS

SEQ ID NO: 1339 - protein, 109 aa, Artificial Sequence; identical to SEQ ID NO: 363
  Synthetic

SEQ ID NO: 1340 - protein, 125 aa, Artificial Sequence; identical to SEQ ID NO: 1338
  Synthetic

SEQ ID NO: 1341 - protein, 109 aa, Artificial Sequence; identical to SEQ ID NO: 375
  Synthetic

SEQ ID NO: 1342 - protein, 125 aa, Artificial Sequence; identical to SEQ ID NO: 1338
  Synthetic

SEQ ID NO: 1343 - protein, 109 aa, Artificial Sequence; identical to SEQ ID NO: 377
  Synthetic

SEQ ID NO: 1344 - protein, 125 aa, Artificial Sequence
  Synthetic
EVQLVESGGGLVQPGGSLKLSCAASGFTFNRYAINWVRQAPGKGVEWVARIRSKYNNYATYYADSVKGRFTISRDDSKNTVYLQMNNLKTEDTAVYYCVRHGNFGNSYLSYFAYWGQGTLVTVSS

SEQ ID NO: 1345 - protein, 109 aa, Artificial Sequence; identical to SEQ ID NO: 411
  Synthetic

SEQ ID NO: 1346 - protein, 125 aa, Artificial Sequence; identical to SEQ ID NO: 1334
  Synthetic

SEQ ID NO: 1347 - protein, 109 aa, Artificial Sequence; identical to SEQ ID NO: 375
  Synthetic

SEQ ID NO: 1348 - protein, 125 aa, Artificial Sequence
  Synthetic
EVQLVESGGGLVQPGGSLKLSCAASGFTFNRYAINWVREAPGKGLEWVARIRSKYNNYATYYADSVKGRFTISRDDSKNTVYLQMNNLKTEDTAVYYCVRHGNFGNSYLSYFAYWGQGTLVTVSS

SEQ ID NO: 1349 - protein, 109 aa, Artificial Sequence; identical to SEQ ID NO: 375
  Synthetic

SEQ ID NO: 1350 - protein, 5 aa, Artificial Sequence
  Synthetic
RYAVN

SEQ ID NO: 1351 - protein, 19 aa, Artificial Sequence
  Synthetic
RIRSKYNNYATYYADSVKG

SEQ ID NO: 1352 - protein, 14 aa, Artificial Sequence
  Synthetic
HGNFGNSYLSYFAY

SEQ ID NO: 1353 - protein, 14 aa, Artificial Sequence
  Synthetic
GSSTGAVTSGYYPN

SEQ ID NO: 1354 - protein, 7 aa, Artificial Sequence
  Synthetic
GTKFLAP

SEQ ID NO: 1355 - protein, 9 aa, Artificial Sequence
  Synthetic
ALWYSNRWV

SEQ ID NO: 1356 - protein, 125 aa, Artificial Sequence
  Synthetic
EVQLVESGGGLVQPGGSLKLSCAASGFTFNRYAVNWVRQAPGKGLEWVARIRSKYNNYATYYADSVKGRFTISRDDSKNTAYLQMNNLKTEDTAVYYCVRHGNFGNSYLSYFAYWGQGTLVTVSS

SEQ ID NO: 1357 - protein, 109 aa, Artificial Sequence; identical to SEQ ID NO: 363
  Synthetic

SEQ ID NO: 1358 - protein, 125 aa, Artificial Sequence
  Synthetic
EVQLVESGGGLVQPGGSLKLSCAASGFTFNRYAMNWVRDAPGKGLEWVARIRSKYNNYATYYADSVKGRFTISRDDSKNTAYLQMNNLKTEDTAVYYCVRHGNFGNSYLSYFAYWGQGTLVTVSS

SEQ ID NO: 1359 - protein, 109 aa, Artificial Sequence; identical to SEQ ID NO: 363
  Synthetic

SEQ ID NO: 1360 - protein, 125 aa, Artificial Sequence; identical to SEQ ID NO: 1358
  Synthetic

SEQ ID NO: 1361 - protein, 109 aa, Artificial Sequence; identical to SEQ ID NO: 375
  Synthetic

SEQ ID NO: 1362 - protein, 125 aa, Artificial Sequence; identical to SEQ ID NO: 1358
  Synthetic

SEQ ID NO: 1363 - protein, 109 aa, Artificial Sequence; identical to SEQ ID NO: 429
  Synthetic

SEQ ID NO: 1364 - protein, 125 aa, Artificial Sequence; identical to SEQ ID NO: 1358
  Synthetic

SEQ ID NO: 1365 - protein, 109 aa, Artificial Sequence; identical to SEQ ID NO: 377
  Synthetic

SEQ ID NO: 1366 - protein, 125 aa, Artificial Sequence; identical to SEQ ID NO: 1358
  Synthetic

SEQ ID NO: 1367 - protein, 109 aa, Artificial Sequence; identical to SEQ ID NO: 379
  Synthetic

SEQ ID NO: 1368 - protein, 125 aa, Artificial Sequence; identical to SEQ ID NO: 1358
  Synthetic

SEQ ID NO: 1369 - protein, 109 aa, Artificial Sequence; identical to SEQ ID NO: 435
  Synthetic

SEQ ID NO: 1370 - protein, 125 aa, Artificial Sequence; identical to SEQ ID NO: 1358
  Synthetic

SEQ ID NO: 1371 - protein, 109 aa, Artificial Sequence; identical to SEQ ID NO: 437
  Synthetic

SEQ ID NO: 1372 - protein, 125 aa, Artificial Sequence
  Synthetic
EVQLVESGGGLVQPGGSLKLSCAASGFTFNRYAMNWVREAPGKGLEWVARIRSKYNNYATYYADSVKGRFTISRDDSKNTAYLQMNNLKTEDTAVYYCVRHGNFGNSYLSYFAYWGQGTLVTVSS

SEQ ID NO: 1373 - protein, 109 aa, Artificial Sequence; identical to SEQ ID NO: 363
  Synthetic

SEQ ID NO: 1374 - protein, 125 aa, Artificial Sequence; identical to SEQ ID NO: 1372
  Synthetic

SEQ ID NO: 1375 - protein, 109 aa, Artificial Sequence; identical to SEQ ID NO: 375
  Synthetic

SEQ ID NO: 1376 - protein, 125 aa, Artificial Sequence; identical to SEQ ID NO: 1372
  Synthetic

SEQ ID NO: 1377 - protein, 109 aa, Artificial Sequence; identical to SEQ ID NO: 429
  Synthetic

SEQ ID NO: 1378 - protein, 125 aa, Artificial Sequence; identical to SEQ ID NO: 1372
  Synthetic

SEQ ID NO: 1379 - protein, 109 aa, Artificial Sequence; identical to SEQ ID NO: 377
  Synthetic

SEQ ID NO: 1380 - protein, 125 aa, Artificial Sequence; identical to SEQ ID NO: 1372
  Synthetic

SEQ ID NO: 1381 - protein, 109 aa, Artificial Sequence; identical to SEQ ID NO: 379
  Synthetic

SEQ ID NO: 1382 - protein, 125 aa, Artificial Sequence; identical to SEQ ID NO: 1372
  Synthetic

SEQ ID NO: 1383 - protein, 109 aa, Artificial Sequence; identical to SEQ ID NO: 435
  Synthetic

SEQ ID NO: 1384 - protein, 125 aa, Artificial Sequence; identical to SEQ ID NO: 1372
  Synthetic

SEQ ID NO: 1385 - protein, 109 aa, Artificial Sequence; identical to SEQ ID NO: 437
  Synthetic

SEQ ID NO: 1386 - protein, 125 aa, Artificial Sequence
  Synthetic
EVQLVESGGGLVQPGGSLKLSCAASGFTFNRYAMNWVRKAPGKGLEWVARIRSKYNNYATYYADSVKGRFTISRDDSKNTAYLQMNNLKTEDTAVYYCVRHGNFGNSYLSYFAYWGQGTLVTVSS

SEQ ID NO: 1387 - protein, 109 aa, Artificial Sequence; identical to SEQ ID NO: 363
  Synthetic

SEQ ID NO: 1388 - protein, 125 aa, Artificial Sequence
  Synthetic
EVQLVESGGGLVQPGGSLKLSCAASGFTFNRYAMNWVRRAPGKGLEWVARIRSKYNNYATYYADSVKGRFTISRDDSKNTAYLQMNNLKTEDTAVYYCVRHGNFGNSYLSYFAYWGQGTLVTVSS

SEQ ID NO: 1389 - protein, 109 aa, Artificial Sequence; identical to SEQ ID NO: 363
  Synthetic

SEQ ID NO: 1390 - protein, 125 aa, Artificial Sequence
  Synthetic
EVQLVESGGGLVQPGGSLKLSCAASGFTFNRYAMNWVRQAPGKGLEWVARIRSKYNNYATYYADSVKGRFTISRDDSKNTAYLQMNNLKTEDTAVYYCARHGNFGNSYLSYFAYWGQGTLVTVSS

SEQ ID NO: 1391 - protein, 109 aa, Artificial Sequence; identical to SEQ ID NO: 363
  Synthetic

SEQ ID NO: 1392 - protein, 125 aa, Artificial Sequence
  Synthetic
EVQLVESGGGLVQPGGSLKLSCAASGFTFNRYAMNWVRQAPGKGLEWVARIRSKYNNYATYYADSVKGRFTISRDDSKNTAYLQMNNLKTEDTAVYYCLRHGNFGNSYLSYFAYWGQGTLVTVSS

SEQ ID NO: 1393 - protein, 109 aa, Artificial Sequence; identical to SEQ ID NO: 363
  Synthetic

SEQ ID NO: 1394 - protein, 5 aa, Artificial Sequence
  Synthetic
RYAIN

SEQ ID NO: 1395 - protein, 19 aa, Artificial Sequence
  Synthetic
RIRSKYNNYATYYADAVKG

SEQ ID NO: 1396 - protein, 14 aa, Artificial Sequence
  Synthetic
AGNFGSSYLSYFAY

SEQ ID NO: 1397 - protein, 14 aa, Artificial Sequence
  Synthetic
GSSTGAVTSGYYPN

SEQ ID NO: 1398 - protein, 7 aa, Artificial Sequence
  Synthetic
GTKFLAP

SEQ ID NO: 1399 - protein, 9 aa, Artificial Sequence
  Synthetic
ALWYSNRWV

SEQ ID NO: 1400 - protein, 125 aa, Artificial Sequence
  Synthetic
EVQLVESGGGLVQPGGSLKLSCAASGFTFNRYAINWVRQAPGKGLEWVARIRSKYNNYATYYADAVKGRFTISRDDSKNTVYLQMNNLKTEDTAVYYCARAGNFGSSYLSYFAYWGQGTLVTVSS

SEQ ID NO: 1401 - protein, 109 aa, Artificial Sequence; identical to SEQ ID NO: 479
  Synthetic

SEQ ID NO: 1402 - protein, 5 aa, Artificial Sequence
  Synthetic
RYAMN

SEQ ID NO: 1403 - protein, 19 aa, Artificial Sequence
  Synthetic
RIRSKYNNYATYYAEAVKG

SEQ ID NO: 1404 - protein, 14 aa, Artificial Sequence
  Synthetic
NENIGTSYLSYFAY

SEQ ID NO: 1405 - protein, 14 aa, Artificial Sequence
  Synthetic
GSSTGAVTSGYYPN

SEQ ID NO: 1406 - protein, 7 aa, Artificial Sequence
  Synthetic
GTKFLAP

SEQ ID NO: 1407 - protein, 9 aa, Artificial Sequence
  Synthetic
ALWYSNRWV

SEQ ID NO: 1408 - protein, 125 aa, Artificial Sequence
  Synthetic
EVQLVESGGGLVQPGGSLKLSCAASGFTFNRYAMNWVRQAPGKGLEWVARIRSKYNNYATYYAEAVKGRFTISRDDSKNTVYLQMNNLKTEDTAVYYCVRNENIGTSYLSYFAYWGQGTLVTVSS

SEQ ID NO: 1409 - protein, 109 aa, Artificial Sequence; identical to SEQ ID NO: 487
  Synthetic

SEQ ID NO: 1410 - protein, 5 aa, Artificial Sequence
  Synthetic
RYAMN

SEQ ID NO: 1411 - protein, 19 aa, Artificial Sequence
  Synthetic
RIRSKYNNYATYYADAVKG

SEQ ID NO: 1412 - protein, 14 aa, Artificial Sequence
  Synthetic
AGNFGSSYLSYFAY

SEQ ID NO: 1413 - protein, 14 aa, Artificial Sequence
  Synthetic
GSSTGAVTSGYYPN

SEQ ID NO: 1414 - protein, 7 aa, Artificial Sequence
  Synthetic
GTKFLAP

SEQ ID NO: 1415 - protein, 9 aa, Artificial Sequence
  Synthetic
ALYYSNRWV

SEQ ID NO: 1416 - protein, 125 aa, Artificial Sequence
  Synthetic
EVQLVESGGGLVQPGGSLKLSCAASGFTFNRYAMNWVRQAPGKGMEWVARIRSKYNNYATYYADAVKGRFTISRDDSKNTLYLQMNNLKTEDTAVYYCVRAGNFGSSYLSYFAYWGQGTLVTVSS

SEQ ID NO: 1417 - protein, 109 aa, Artificial Sequence; identical to SEQ ID NO: 495
  Synthetic

SEQ ID NO: 1418 - protein, 5 aa, Artificial Sequence
  Synthetic
RYAMN

SEQ ID NO: 1419 - protein, 19 aa, Artificial Sequence
  Synthetic
RIRSKYNNYATYYADAVKG

SEQ ID NO: 1420 - protein, 14 aa, Artificial Sequence
  Synthetic
AGNFGTSYLSYFAY

SEQ ID NO: 1421 - protein, 14 aa, Artificial Sequence
  Synthetic
GSSTGAVTSGYYPN

SEQ ID NO: 1422 - protein, 7 aa, Artificial Sequence
  Synthetic
GTKFLAP

SEQ ID NO: 1423 - protein, 9 aa, Artificial Sequence
  Synthetic
ALWYSNRWV

SEQ ID NO: 1424 - protein, 125 aa, Artificial Sequence
  Synthetic
EVQLVESGGGLVQPGGSLKLSCAASGFTFNRYAMNWVRQAPGKGMEWVARIRSKYNNYATYYADAVKGRFTISRDDSKNTLYLQMNNLKTEDTAVYYCVRAGNFGTSYLSYFAYWGQGTLVTVSS

SEQ ID NO: 1425 - protein, 109 aa, Artificial Sequence; identical to SEQ ID NO: 479
  Synthetic

SEQ ID NO: 1426 - protein, 5 aa, Artificial Sequence
  Synthetic
RYAIN

SEQ ID NO: 1427 - protein, 19 aa, Artificial Sequence
  Synthetic
RIRSKYNNYATYYADAVKG

SEQ ID NO: 1428 - protein, 14 aa, Artificial Sequence
  Synthetic
NANFGTSYLSYFAY

SEQ ID NO: 1429 - protein, 14 aa, Artificial Sequence
  Synthetic
GSSTGAVTSGYYPN

SEQ ID NO: 1430 - protein, 7 aa, Artificial Sequence
  Synthetic
GTKFLAP

SEQ ID NO: 1431 - protein, 9 aa, Artificial Sequence
  Synthetic
ALWYSNRWV

SEQ ID NO: 1432 - protein, 125 aa, Artificial Sequence
  Synthetic
EVQLVESGGGLVQPGGSLKLSCAASGFTFNRYAINWVREAPGKGLEWVARIRSKYNNYATYYADAVKGRFTISRDDSKNTAYLQMNNLKTEDTAVYYCVRNANFGTSYLSYFAYWGQGTLVTVSS

SEQ ID NO: 1433 - protein, 109 aa, Artificial Sequence; identical to SEQ ID NO: 379
  Synthetic

SEQ ID NO: 1434 - protein, 125 aa, Artificial Sequence; identical to SEQ ID NO: 1296
  Synthetic

SEQ ID NO: 1435 - protein, 109 aa, Artificial Sequence; identical to SEQ ID NO: 513
  Synthetic

SEQ ID NO: 1436 - protein, 125 aa, Artificial Sequence; identical to SEQ ID NO: 1296
  Synthetic

SEQ ID NO: 1437 - protein, 109 aa, Artificial Sequence; identical to SEQ ID NO: 515
  Synthetic

SEQ ID NO: 1438 - protein, 125 aa, Artificial Sequence; identical to SEQ ID NO: 1296
  Synthetic

SEQ ID NO: 1439 - protein, 109 aa, Artificial Sequence; identical to SEQ ID NO: 517
  Synthetic

SEQ ID NO: 1440 - protein, 125 aa, Artificial Sequence; identical to SEQ ID NO: 1296
  Synthetic

SEQ ID NO: 1441 - protein, 109 aa, Artificial Sequence; identical to SEQ ID NO: 519
  Synthetic

SEQ ID NO: 1442 - protein, 125 aa, Artificial Sequence; identical to SEQ ID NO: 1296
  Synthetic

SEQ ID NO: 1443 - protein, 109 aa, Artificial Sequence; identical to SEQ ID NO: 521
  Synthetic

SEQ ID NO: 1444 - protein, 125 aa, Artificial Sequence; identical to SEQ ID NO: 1296
  Synthetic

SEQ ID NO: 1445 - protein, 109 aa, Artificial Sequence; identical to SEQ ID NO: 377
  Synthetic

SEQ ID NO: 1446 - protein, 5 aa, Artificial Sequence
  Synthetic
RYAMN

SEQ ID NO: 1447 - protein, 19 aa, Artificial Sequence
  Synthetic
RIRSKYNNYATYYADSVKG

SEQ ID NO: 1448 - protein, 14 aa, Artificial Sequence
  Synthetic
HGNFGNSYLSYFAY

SEQ ID NO: 1449 - protein, 14 aa, Artificial Sequence
  Synthetic
GSSTGAVTSGYYPN

SEQ ID NO: 1450 - protein, 7 aa, Artificial Sequence
  Synthetic
GTKFLAP

SEQ ID NO: 1451 - protein, 9 aa, Artificial Sequence
  Synthetic
LLWYSNRWV

SEQ ID NO: 1452 - protein, 125 aa, Artificial Sequence; identical to SEQ ID NO: 1296
  Synthetic

SEQ ID NO: 1453 - protein, 109 aa, Artificial Sequence; identical to SEQ ID NO: 531
  Synthetic

SEQ ID NO: 1454 - protein, 125 aa, Artificial Sequence; identical to SEQ ID NO: 1296
  Synthetic

SEQ ID NO: 1455 - protein, 109 aa, Artificial Sequence; identical to SEQ ID NO: 469
  Synthetic

SEQ ID NO: 1456 - protein, 125 aa, Artificial Sequence; identical to SEQ ID NO: 1296
  Synthetic

SEQ ID NO: 1457 - protein, 109 aa, Artificial Sequence; identical to SEQ ID NO: 471
  Synthetic

SEQ ID NO: 1458 - protein, 125 aa, Artificial Sequence; identical to SEQ ID NO: 1296
  Synthetic

SEQ ID NO: 1459 - protein, 109 aa, Artificial Sequence; identical to SEQ ID NO: 537
  Synthetic

SEQ ID NO: 1460 - protein, 5 aa, Artificial Sequence
  Synthetic
RYAMN

SEQ ID NO: 1461 - protein, 19 aa, Artificial Sequence
  Synthetic
RIRSKYNNYATYYADSVKG

SEQ ID NO: 1462 - protein, 14 aa, Artificial Sequence
  Synthetic
HGNFGNSYLSYFAY

SEQ ID NO: 1463 - protein, 14 aa, Artificial Sequence
  Synthetic
GSSTGAVTSGYYPN

SEQ ID NO: 1464 - protein, 7 aa, Artificial Sequence
  Synthetic
GTKFLAP

SEQ ID NO: 1465 - protein, 9 aa, Artificial Sequence
  Synthetic
ALYYSNRWV

SEQ ID NO: 1466 - protein, 125 aa, Artificial Sequence; identical to SEQ ID NO: 1296
  Synthetic

SEQ ID NO: 1467 - protein, 109 aa, Artificial Sequence; identical to SEQ ID NO: 545
  Synthetic

SEQ ID NO: 1468 - protein, 5 aa, Artificial Sequence
  Synthetic
SYAMN

SEQ ID NO: 1469 - protein, 19 aa, Artificial Sequence
  Synthetic
RIRSKYNNYATYYADSVKG

SEQ ID NO: 1470 - protein, 14 aa, Artificial Sequence
  Synthetic
HGNFGNSYLSFWAY

SEQ ID NO: 1471 - protein, 14 aa, Artificial Sequence
  Synthetic
GSSTGAVTSGYYPN

SEQ ID NO: 1472 - protein, 7 aa, Artificial Sequence
  Synthetic
GTKFLAP

SEQ ID NO: 1473 - protein, 9 aa, Artificial Sequence
  Synthetic
ALWYSNRWV

SEQ ID NO: 1474 - protein, 125 aa, Artificial Sequence
  Synthetic
EVQLVESGGGLEQPGGSLKLSCAASGFTFNSYAMNWVRQAPGKGLEWVARIRSKYNNYATYYADSVKGRFTISRDDSKNTAYLQMNNLKTEDTAVYYCVRHGNFGNSYLSFWAYWGQGTLVTVSS

SEQ ID NO: 1475 - protein, 109 aa, Artificial Sequence; identical to SEQ ID NO: 363
  Synthetic

SEQ ID NO: 1476 - protein, 125 aa, Artificial Sequence
  Synthetic
EVQLVESGGGLEQPGGSLKLSCAASGFTFNSYAMNWVRQAPGKGLEWVARIRSKYNNYATYYADSVKGRFTISRDDSKNTIYLQMNNLKTEDTAVYYCVRHGNFGNSYLSFWAYWGQGTLVTVSS

SEQ ID NO: 1477 - protein, 109 aa, Artificial Sequence; identical to SEQ ID NO: 363
  Synthetic

SEQ ID NO: 1478 - protein, 125 aa, Artificial Sequence
  Synthetic
EVQLVESGGGLEQPGGSLKLSCAASGFTFNSYAMNWVRQAPGKGLEWVARIRSKYNNYATYYADSVKGRFTISRDDSKNTLYLQMNNLKTEDTAVYYCVRHGNFGNSYLSFWAYWGQGTLVTVSS

SEQ ID NO: 1479 - protein, 109 aa, Artificial Sequence; identical to SEQ ID NO: 363
  Synthetic

SEQ ID NO: 1480 - protein, 125 aa, Artificial Sequence
  Synthetic
EVQLVESGGGLEQPGGSLKLSCAASGFTFNSYAMNWVRQAPGKGLEWVARIRSKYNNYATYYADSVKGRFTISRDDSKNTTYLQMNNLKTEDTAVYYCVRHGNFGNSYLSFWAYWGQGTLVTVSS

SEQ ID NO: 1481 - protein, 109 aa, Artificial Sequence; identical to SEQ ID NO: 363
  Synthetic

SEQ ID NO: 1482 - protein, 125 aa, Artificial Sequence
  Synthetic
EVQLVESGGGLEQPGGSLKLSCAASGFTFNSYAMNWVRQAPGKGLEWVARIRSKYNNYATYYADSVKGRFTISRDDSKNTVYLQMNNLKTEDTAVYYCVRHGNFGNSYLSFWAYWGQGTLVTVSS

SEQ ID NO: 1483 - protein, 109 aa, Artificial Sequence; identical to SEQ ID NO: 363
  Synthetic

SEQ ID NO: 1484 - protein, 125 aa, Artificial Sequence
  Synthetic
EVQLVESGGGLEQPGGSLKLSCAASGFTFNSYAMNWVRQAPGKGMEWVARIRSKYNNYATYYADSVKGRFTISRDDSKNTAYLQMNNLKTEDTAVYYCVRHGNFGNSYLSFWAYWGQGTLVTVSS

SEQ ID NO: 1485 - protein, 109 aa, Artificial Sequence; identical to SEQ ID NO: 363
  Synthetic

SEQ ID NO: 1486 - protein, 125 aa, Artificial Sequence; identical to SEQ ID NO: 1484
  Synthetic

SEQ ID NO: 1487 - protein, 109 aa, Artificial Sequence; identical to SEQ ID NO: 375
  Synthetic

SEQ ID NO: 1488 - protein, 125 aa, Artificial Sequence; identical to SEQ ID NO: 1484
  Synthetic

SEQ ID NO: 1489 - protein, 109 aa, Artificial Sequence; identical to SEQ ID NO: 377
  Synthetic

SEQ ID NO: 1490 - protein, 125 aa, Artificial Sequence; identical to SEQ ID NO: 1484
  Synthetic

SEQ ID NO: 1491 - protein, 109 aa, Artificial Sequence; identical to SEQ ID NO: 379
  Synthetic

SEQ ID NO: 1492 - protein, 125 aa, Artificial Sequence
  Synthetic
EVQLVESGGGLEQPGGSLKLSCAASGFTFNSYAMNWVRQAPGKGVEWVARIRSKYNNYATYYADSVKGRFTISRDDSKNTAYLQMNNLKTEDTAVYYCVRHGNFGNSYLSFWAYWGQGTLVTVSS

SEQ ID NO: 1493 - protein, 109 aa, Artificial Sequence; identical to SEQ ID NO: 363
  Synthetic

SEQ ID NO: 1494 - protein, 125 aa, Artificial Sequence; identical to SEQ ID NO: 1492
  Synthetic

SEQ ID NO: 1495 - protein, 109 aa, Artificial Sequence; identical to SEQ ID NO: 383
  Synthetic

SEQ ID NO: 1496 - protein, 125 aa, Artificial Sequence; identical to SEQ ID NO: 1492
  Synthetic

SEQ ID NO: 1497 - protein, 109 aa, Artificial Sequence; identical to SEQ ID NO: 385
  Synthetic

SEQ ID NO: 1498 - protein, 5 aa, Artificial Sequence
  Synthetic
SYAFN

SEQ ID NO: 1499 - protein, 19 aa, Artificial Sequence
  Synthetic
RIRSKYNNYATYYADSVKG

SEQ ID NO: 1500 - protein, 14 aa, Artificial Sequence
  Synthetic
HGNFGNSYLSFWAY

SEQ ID NO: 1501 - protein, 14 aa, Artificial Sequence
  Synthetic
GSSTGAVTSGYYPN

SEQ ID NO: 1502 - protein, 7 aa, Artificial Sequence
  Synthetic
GTKFLAP

SEQ ID NO: 1503 - protein, 9 aa, Artificial Sequence
  Synthetic
ALWYSNRWV

SEQ ID NO: 1504 - protein, 125 aa, Artificial Sequence
  Synthetic
EVQLVESGGGLEQPGGSLKLSCAASGFTFNSYAFNWVRQAPGKGLEWVARIRSKYNNYATYYADSVKGRFTISRDDSKNTVYLQMNNLKTEDTAVYYCVRHGNFGNSYLSFWAYWGQGTLVTVSS

SEQ ID NO: 1505 - protein, 109 aa, Artificial Sequence; identical to SEQ ID NO: 363
  Synthetic

SEQ ID NO: 1506 - protein, 5 aa, Artificial Sequence
  Synthetic
SYAIN

SEQ ID NO: 1507 - protein, 19 aa, Artificial Sequence
  Synthetic
RIRSKYNNYATYYADSVKG

SEQ ID NO: 1508 - protein, 14 aa, Artificial Sequence
  Synthetic
HGNFGNSYLSFWAY

SEQ ID NO: 1509 - protein, 14 aa, Artificial Sequence
  Synthetic
GSSTGAVTSGYYPN

SEQ ID NO: 1510 - protein, 7 aa, Artificial Sequence
  Synthetic
GTKFLAP

SEQ ID NO: 1511 - protein, 9 aa, Artificial Sequence
  Synthetic
ALWYSNRWV

SEQ ID NO: 1512 - protein, 125 aa, Artificial Sequence
  Synthetic
EVQLVESGGGLEQPGGSLKLSCAASGFTFNSYAINWVRQAPGKGLEWVARIRSKYNNYATYYADSVKGRFTISRDDSKNTAYLQMNNLKTEDTAVYYCVRHGNFGNSYLSFWAYWGQGTLVTVSS

SEQ ID NO: 1513 - protein, 109 aa, Artificial Sequence; identical to SEQ ID NO: 363
  Synthetic

SEQ ID NO: 1514 - protein, 125 aa, Artificial Sequence
  Synthetic
EVQLVESGGGLEQPGGSLKLSCAASGFTFNSYAINWVRQAPGKGLEWVARIRSKYNNYATYYADSVKGRFTISRDDSKNTLYLQMNNLKTEDTAVYYCVRHGNFGNSYLSFWAYWGQGTLVTVSS

SEQ ID NO: 1515 - protein, 109 aa, Artificial Sequence; identical to SEQ ID NO: 363
  Synthetic

SEQ ID NO: 1516 - protein, 125 aa, Artificial Sequence
  Synthetic
EVQLVESGGGLEQPGGSLKLSCAASGFTFNSYAINWVRQAPGKGLEWVARIRSKYNNYATYYADSVKGRFTISRDDSKNTVYLQMNNLKTEDTAVYYCVRHGNFGNSYLSFWAYWGQGTLVTVSS

SEQ ID NO: 1517 - protein, 109 aa, Artificial Sequence; identical to SEQ ID NO: 363
  Synthetic

SEQ ID NO: 1518 - protein, 125 aa, Artificial Sequence; identical to SEQ ID NO: 1516
  Synthetic

SEQ ID NO: 1519 - protein, 109 aa, Artificial Sequence; identical to SEQ ID NO: 375
  Synthetic

SEQ ID NO: 1520 - protein, 125 aa, Artificial Sequence; identical to SEQ ID NO: 1516
  Synthetic

SEQ ID NO: 1521 - protein, 109 aa, Artificial Sequence; identical to SEQ ID NO: 377
  Synthetic

SEQ ID NO: 1522 - protein, 125 aa, Artificial Sequence
  Synthetic
EVQLVESGGGLEQPGGSLKLSCAASGFTFNSYAINWVRQAPGKGVEWVARIRSKYNNYATYYADSVKGRFTISRDDSKNTVYLQMNNLKTEDTAVYYCVRHGNFGNSYLSFWAYWGQGTLVTVSS

SEQ ID NO: 1523 - protein, 109 aa, Artificial Sequence; identical to SEQ ID NO: 411
  Synthetic

SEQ ID NO: 1524 - protein, 125 aa, Artificial Sequence; identical to SEQ ID NO: 1512
  Synthetic

SEQ ID NO: 1525 - protein, 109 aa, Artificial Sequence; identical to SEQ ID NO: 375
  Synthetic

SEQ ID NO: 1526 - protein, 125 aa, Artificial Sequence
  Synthetic
EVQLVESGGGLEQPGGSLKLSCAASGFTFNSYAINWVREAPGKGLEWVARIRSKYNNYATYYADSVKGRFTISRDDSKNTVYLQMNNLKTEDTAVYYCVRHGNFGNSYLSFWAYWGQGTLVTVSS

SEQ ID NO: 1527 - protein, 109 aa, Artificial Sequence; identical to SEQ ID NO: 375
  Synthetic

SEQ ID NO: 1528 - protein, 5 aa, Artificial Sequence
  Synthetic
SYAVN

SEQ ID NO: 1529 - protein, 19 aa, Artificial Sequence
  Synthetic
RIRSKYNNYATYYADSVKG

SEQ ID NO: 1530 - protein, 14 aa, Artificial Sequence
  Synthetic
HGNFGNSYLSFWAY

SEQ ID NO: 1531 - protein, 14 aa, Artificial Sequence
  Synthetic
GSSTGAVTSGYYPN

SEQ ID NO: 1532 - protein, 7 aa, Artificial Sequence
  Synthetic
GTKFLAP

SEQ ID NO: 1533 - protein, 9 aa, Artificial Sequence
  Synthetic
ALWYSNRWV

SEQ ID NO: 1534 - protein, 125 aa, Artificial Sequence
  Synthetic
EVQLVESGGGLEQPGGSLKLSCAASGFTFNSYAVNWVRQAPGKGLEWVARIRSKYNNYATYYADSVKGRFTISRDDSKNTAYLQMNNLKTEDTAVYYCVRHGNFGNSYLSFWAYWGQGTLVTVSS

SEQ ID NO: 1535 - protein, 109 aa, Artificial Sequence; identical to SEQ ID NO: 363
  Synthetic

SEQ ID NO: 1536 - protein, 125 aa, Artificial Sequence
  Synthetic
EVQLVESGGGLEQPGGSLKLSCAASGFTFNSYAMNWVRDAPGKGLEWVARIRSKYNNYATYYADSVKGRFTISRDDSKNTAYLQMNNLKTEDTAVYYCVRHGNFGNSYLSFWAYWGQGTLVTVSS

SEQ ID NO: 1537 - protein, 109 aa, Artificial Sequence; identical to SEQ ID NO: 363
  Synthetic

SEQ ID NO: 1538 - protein, 125 aa, Artificial Sequence; identical to SEQ ID NO: 1536
  Synthetic

SEQ ID NO: 1539 - protein, 109 aa, Artificial Sequence; identical to SEQ ID NO: 375
  Synthetic

SEQ ID NO: 1540 - protein, 125 aa, Artificial Sequence; identical to SEQ ID NO: 1536
  Synthetic

SEQ ID NO: 1541 - protein, 109 aa, Artificial Sequence; identical to SEQ ID NO: 429
  Synthetic

SEQ ID NO: 1542 - protein, 125 aa, Artificial Sequence; identical to SEQ ID NO: 1536
  Synthetic

SEQ ID NO: 1543 - protein, 109 aa, Artificial Sequence; identical to SEQ ID NO: 377
  Synthetic

SEQ ID NO: 1544 - protein, 125 aa, Artificial Sequence; identical to SEQ ID NO: 1536
  Synthetic

SEQ ID NO: 1545 - protein, 109 aa, Artificial Sequence; identical to SEQ ID NO: 379
  Synthetic

SEQ ID NO: 1546 - protein, 125 aa, Artificial Sequence; identical to SEQ ID NO: 1536
  Synthetic

SEQ ID NO: 1547 - protein, 109 aa, Artificial Sequence; identical to SEQ ID NO: 435
  Synthetic

SEQ ID NO: 1548 - protein, 125 aa, Artificial Sequence; identical to SEQ ID NO: 1536
  Synthetic

SEQ ID NO: 1549 - protein, 109 aa, Artificial Sequence; identical to SEQ ID NO: 437
  Synthetic

SEQ ID NO: 1550 - protein, 125 aa, Artificial Sequence
  Synthetic
EVQLVESGGGLEQPGGSLKLSCAASGFTFNSYAMNWVREAPGKGLEWVARIRSKYNNYATYYADSVKGRFTISRDDSKNTAYLQMNNLKTEDTAVYYCVRHGNFGNSYLSFWAYWGQGTLVTVSS

SEQ ID NO: 1551 - protein, 109 aa, Artificial Sequence; identical to SEQ ID NO: 363
  Synthetic

SEQ ID NO: 1552 - protein, 125 aa, Artificial Sequence; identical to SEQ ID NO: 1550
  Synthetic

SEQ ID NO: 1553 - protein, 109 aa, Artificial Sequence; identical to SEQ ID NO: 375
  Synthetic

SEQ ID NO: 1554 - protein, 125 aa, Artificial Sequence; identical to SEQ ID NO: 1550
  Synthetic

SEQ ID NO: 1555 - protein, 109 aa, Artificial Sequence; identical to SEQ ID NO: 429
  Synthetic

SEQ ID NO: 1556 - protein, 125 aa, Artificial Sequence; identical to SEQ ID NO: 1550
  Synthetic

SEQ ID NO: 1557 - protein, 109 aa, Artificial Sequence; identical to SEQ ID NO: 377
  Synthetic

SEQ ID NO: 1558 - protein, 125 aa, Artificial Sequence; identical to SEQ ID NO: 1550
  Synthetic

SEQ ID NO: 1559 - protein, 109 aa, Artificial Sequence; identical to SEQ ID NO: 379
  Synthetic

SEQ ID NO: 1560 - protein, 125 aa, Artificial Sequence; identical to SEQ ID NO: 1550
  Synthetic

SEQ ID NO: 1561 - protein, 109 aa, Artificial Sequence; identical to SEQ ID NO: 435
  Synthetic

SEQ ID NO: 1562 - protein, 125 aa, Artificial Sequence; identical to SEQ ID NO: 1550
  Synthetic

SEQ ID NO: 1563 - protein, 109 aa, Artificial Sequence; identical to SEQ ID NO: 437
  Synthetic

SEQ ID NO: 1564 - protein, 125 aa, Artificial Sequence
  Synthetic
EVQLVESGGGLEQPGGSLKLSCAASGFTFNSYAMNWVRKAPGKGLEWVARIRSKYNNYATYYADSVKGRFTISRDDSKNTAYLQMNNLKTEDTAVYYCVRHGNFGNSYLSFWAYWGQGTLVTVSS

SEQ ID NO: 1565 - protein, 109 aa, Artificial Sequence; identical to SEQ ID NO: 363
  Synthetic

SEQ ID NO: 1566 - protein, 125 aa, Artificial Sequence
  Synthetic
EVQLVESGGGLEQPGGSLKLSCAASGFTFNSYAMNWVRRAPGKGLEWVARIRSKYNNYATYYADSVKGRFTISRDDSKNTAYLQMNNLKTEDTAVYYCVRHGNFGNSYLSFWAYWGQGTLVTVSS

SEQ ID NO: 1567 - protein, 109 aa, Artificial Sequence; identical to SEQ ID NO: 363
  Synthetic

SEQ ID NO: 1568 - protein, 125 aa, Artificial Sequence
  Synthetic
EVQLVESGGGLEQPGGSLKLSCAASGFTFNSYAMNWVRQAPGKGLEWVARIRSKYNNYATYYADSVKGRFTISRDDSKNTAYLQMNNLKTEDTAVYYCARHGNFGNSYLSFWAYWGQGTLVTVSS

SEQ ID NO: 1569 - protein, 109 aa, Artificial Sequence; identical to SEQ ID NO: 363
  Synthetic

SEQ ID NO: 1570 - protein, 125 aa, Artificial Sequence
  Synthetic
EVQLVESGGGLEQPGGSLKLSCAASGFTFNSYAMNWVRQAPGKGLEWVARIRSKYNNYATYYADSVKGRFTISRDDSKNTAYLQMNNLKTEDTAVYYCLRHGNFGNSYLSFWAYWGQGTLVTVSS

SEQ ID NO: 1571 - protein, 109 aa, Artificial Sequence; identical to SEQ ID NO: 363
  Synthetic

SEQ ID NO: 1572 - protein, 5 aa, Artificial Sequence
  Synthetic
SYAMN

SEQ ID NO: 1573 - protein, 19 aa, Artificial Sequence
  Synthetic
RIRSKYNNYATYYADSVKG

SEQ ID NO: 1574 - protein, 14 aa, Artificial Sequence
  Synthetic
HGNFGNSYLSFFAY

SEQ ID NO: 1575 - protein, 14 aa, Artificial Sequence
  Synthetic
GSSTGAVTSGYYPN

SEQ ID NO: 1576 - protein, 7 aa, Artificial Sequence
  Synthetic
GTKFLAP

SEQ ID NO: 1577 - protein, 9 aa, Artificial Sequence
  Synthetic
ALWYSNRWV

SEQ ID NO: 1578 - protein, 125 aa, Artificial Sequence
  Synthetic
EVQLVESGGGLEQPGGSLKLSCAASGFTFNSYAMNWVRQAPGKGLEWVARIRSKYNNYATYYADSVKGRFTISRDDSKNTAYLQMNNLKTEDTAVYYCVRHGNFGNSYLSFFAYWGQGTLVTVSS

SEQ ID NO: 1579 - protein, 109 aa, Artificial Sequence; identical to SEQ ID NO: 363
  Synthetic

SEQ ID NO: 1580 - protein, 125 aa, Artificial Sequence; identical to SEQ ID NO: 1578
  Synthetic

SEQ ID NO: 1581 - protein, 109 aa, Artificial Sequence; identical to SEQ ID NO: 469
  Synthetic

SEQ ID NO: 1582 - protein, 125 aa, Artificial Sequence; identical to SEQ ID NO: 1578
  Synthetic

SEQ ID NO: 1583 - protein, 109 aa, Artificial Sequence; identical to SEQ ID NO: 471
  Synthetic

SEQ ID NO: 1584 - protein, 5 aa, Artificial Sequence
  Synthetic
SYAIN

SEQ ID NO: 1585 - protein, 19 aa, Artificial Sequence
  Synthetic
RIRSKYNNYATYYADAVKG

SEQ ID NO: 1586 - protein, 14 aa, Artificial Sequence
  Synthetic
AGNFGSSYLSFWAY

SEQ ID NO: 1587 - protein, 14 aa, Artificial Sequence
  Synthetic
GSSTGAVTSGYYPN

SEQ ID NO: 1588 - protein, 7 aa, Artificial Sequence
  Synthetic
GTKFLAP

SEQ ID NO: 1589 - protein, 9 aa, Artificial Sequence
  Synthetic
ALWYSNRWV

SEQ ID NO: 1590 - protein, 125 aa, Artificial Sequence
  Synthetic
EVQLVESGGGLEQPGGSLKLSCAASGFTFNSYAINWVRQAPGKGLEWVARIRSKYNNYATYYADAVKGRFTISRDDSKNTVYLQMNNLKTEDTAVYYCARAGNFGSSYLSFWAYWGQGTLVTVSS

SEQ ID NO: 1591 - protein, 109 aa, Artificial Sequence; identical to SEQ ID NO: 479
  Synthetic

SEQ ID NO: 1592 - protein, 5 aa, Artificial Sequence
  Synthetic
SYAMN

SEQ ID NO: 1593 - protein, 19 aa, Artificial Sequence
  Synthetic
RIRSKYNNYATYYAEAVKG

SEQ ID NO: 1594 - protein, 14 aa, Artificial Sequence
  Synthetic
NENIGTSYLSFWAY

SEQ ID NO: 1595 - protein, 14 aa, Artificial Sequence
  Synthetic
GSSTGAVTSGYYPN

SEQ ID NO: 1596 - protein, 7 aa, Artificial Sequence
  Synthetic
GTKFLAP

SEQ ID NO: 1597 - protein, 9 aa, Artificial Sequence
  Synthetic
ALWYSNRWV

SEQ ID NO: 1598 - protein, 125 aa, Artificial Sequence
  Synthetic
EVQLVESGGGLEQPGGSLKLSCAASGFTFNSYAMNWVRQAPGKGLEWVARIRSKYNNYATYYAEAVKGRFTISRDDSKNTVYLQMNNLKTEDTAVYYCVRNENIGTSYLSFWAYWGQGTLVTVSS

SEQ ID NO: 1599 - protein, 109 aa, Artificial Sequence; identical to SEQ ID NO: 487
  Synthetic

SEQ ID NO: 1600 - protein, 5 aa, Artificial Sequence
  Synthetic
SYAMN

SEQ ID NO: 1601 - protein, 19 aa, Artificial Sequence
  Synthetic
RIRSKYNNYATYYADAVKG

SEQ ID NO: 1602 - protein, 14 aa, Artificial Sequence
  Synthetic
AGNFGSSYLSFFAY

SEQ ID NO: 1603 - protein, 14 aa, Artificial Sequence
  Synthetic
GSSTGAVTSGYYPN

SEQ ID NO: 1604 - protein, 7 aa, Artificial Sequence
  Synthetic
GTKFLAP

SEQ ID NO: 1605 - protein, 9 aa, Artificial Sequence
  Synthetic
ALYYSNRWV

SEQ ID NO: 1606 - protein, 125 aa, Artificial Sequence
  Synthetic
EVQLVESGGGLEQPGGSLKLSCAASGFTFNSYAMNWVRQAPGKGMEWVARIRSKYNNYATYYADAVKGRFTISRDDSKNTLYLQMNNLKTEDTAVYYCVRAGNFGSSYLSFFAYWGQGTLVTVSS

SEQ ID NO: 1607 - protein, 109 aa, Artificial Sequence; identical to SEQ ID NO: 495
  Synthetic

SEQ ID NO: 1608 - protein, 5 aa, Artificial Sequence
  Synthetic
SYAMN

SEQ ID NO: 1609 - protein, 19 aa, Artificial Sequence
  Synthetic
RIRSKYNNYATYYADAVKG

SEQ ID NO: 1610 - protein, 14 aa, Artificial Sequence
  Synthetic
AGNFGTSYLSFWAY

SEQ ID NO: 1611 - protein, 14 aa, Artificial Sequence
  Synthetic
GSSTGAVTSGYYPN

SEQ ID NO: 1612 - protein, 7 aa, Artificial Sequence
  Synthetic
GTKFLAP

SEQ ID NO: 1613 - protein, 9 aa, Artificial Sequence
  Synthetic
ALWYSNRWV

SEQ ID NO: 1614 - protein, 125 aa, Artificial Sequence
  Synthetic
EVQLVESGGGLEQPGGSLKLSCAASGFTFNSYAMNWVRQAPGKGMEWVARIRSKYNNYATYYADAVKGRFTISRDDSKNTLYLQMNNLKTEDTAVYYCVRAGNFGTSYLSFWAYWGQGTLVTVSS

SEQ ID NO: 1615 - protein, 109 aa, Artificial Sequence; identical to SEQ ID NO: 479
  Synthetic

SEQ ID NO: 1616 - protein, 5 aa, Artificial Sequence
  Synthetic
SYAIN

SEQ ID NO: 1617 - protein, 19 aa, Artificial Sequence
  Synthetic
RIRSKYNNYATYYADAVKG

SEQ ID NO: 1618 - protein, 14 aa, Artificial Sequence
  Synthetic
NANFGTSYLSFFAY

SEQ ID NO: 1619 - protein, 14 aa, Artificial Sequence
  Synthetic
GSSTGAVTSGYYPN

SEQ ID NO: 1620 - protein, 7 aa, Artificial Sequence
  Synthetic
GTKFLAP

SEQ ID NO: 1621 - protein, 9 aa, Artificial Sequence
  Synthetic
ALWYSNRWV

SEQ ID NO: 1622 - protein, 125 aa, Artificial Sequence
  Synthetic
EVQLVESGGGLEQPGGSLKLSCAASGFTFNSYAINWVREAPGKGLEWVARIRSKYNNYATYYADAVKGRFTISRDDSKNTAYLQMNNLKTEDTAVYYCVRNANFGTSYLSFFAYWGQGTLVTVSS

SEQ ID NO: 1623 - protein, 109 aa, Artificial Sequence; identical to SEQ ID NO: 379
  Synthetic

SEQ ID NO: 1624 - protein, 125 aa, Artificial Sequence; identical to SEQ ID NO: 1474
  Synthetic

SEQ ID NO: 1625 - protein, 109 aa, Artificial Sequence; identical to SEQ ID NO: 513
  Synthetic

SEQ ID NO: 1626 - protein, 125 aa, Artificial Sequence; identical to SEQ ID NO: 1474
  Synthetic

SEQ ID NO: 1627 - protein, 109 aa, Artificial Sequence; identical to SEQ ID NO: 515
  Synthetic

SEQ ID NO: 1628 - protein, 125 aa, Artificial Sequence; identical to SEQ ID NO: 1474
  Synthetic

SEQ ID NO: 1629 - protein, 109 aa, Artificial Sequence; identical to SEQ ID NO: 517
  Synthetic

SEQ ID NO: 1630 - protein, 125 aa, Artificial Sequence; identical to SEQ ID NO: 1474
  Synthetic

SEQ ID NO: 1631 - protein, 109 aa, Artificial Sequence; identical to SEQ ID NO: 519
  Synthetic

SEQ ID NO: 1632 - protein, 125 aa, Artificial Sequence; identical to SEQ ID NO: 1474
  Synthetic

SEQ ID NO: 1633 - protein, 109 aa, Artificial Sequence; identical to SEQ ID NO: 521
  Synthetic

SEQ ID NO: 1634 - protein, 125 aa, Artificial Sequence; identical to SEQ ID NO: 1474
  Synthetic

SEQ ID NO: 1635 - protein, 109 aa, Artificial Sequence; identical to SEQ ID NO: 377
  Synthetic

SEQ ID NO: 1636 - protein, 5 aa, Artificial Sequence
  Synthetic
SYAMN

SEQ ID NO: 1637 - protein, 19 aa, Artificial Sequence
  Synthetic
RIRSKYNNYATYYADSVKG

SEQ ID NO: 1638 - protein, 14 aa, Artificial Sequence
  Synthetic
HGNFGNSYLSFWAY

SEQ ID NO: 1639 - protein, 14 aa, Artificial Sequence
  Synthetic
GSSTGAVTSGYYPN

SEQ ID NO: 1640 - protein, 7 aa, Artificial Sequence
  Synthetic
GTKFLAP

SEQ ID NO: 1641 - protein, 9 aa, Artificial Sequence
  Synthetic
LLWYSNRWV

SEQ ID NO: 1642 - protein, 125 aa, Artificial Sequence; identical to SEQ ID NO: 1474
  Synthetic

SEQ ID NO: 1643 - protein, 109 aa, Artificial Sequence; identical to SEQ ID NO: 531
  Synthetic

SEQ ID NO: 1644 - protein, 125 aa, Artificial Sequence; identical to SEQ ID NO: 1474
  Synthetic

SEQ ID NO: 1645 - protein, 109 aa, Artificial Sequence; identical to SEQ ID NO: 469
  Synthetic

SEQ ID NO: 1646 - protein, 125 aa, Artificial Sequence; identical to SEQ ID NO: 1474
  Synthetic

SEQ ID NO: 1647 - protein, 109 aa, Artificial Sequence; identical to SEQ ID NO: 471
  Synthetic

SEQ ID NO: 1648 - protein, 125 aa, Artificial Sequence; identical to SEQ ID NO: 1474
  Synthetic

SEQ ID NO: 1649 - protein, 109 aa, Artificial Sequence; identical to SEQ ID NO: 537
  Synthetic

SEQ ID NO: 1650 - protein, 5 aa, Artificial Sequence
  Synthetic
SYAMN

SEQ ID NO: 1651 - protein, 19 aa, Artificial Sequence
  Synthetic
RIRSKYNNYATYYADSVKG

SEQ ID NO: 1652 - protein, 14 aa, Artificial Sequence
  Synthetic
HGNFGNSYLSFWAY

SEQ ID NO: 1653 - protein, 14 aa, Artificial Sequence
  Synthetic
GSSTGAVTSGYYPN

SEQ ID NO: 1654 - protein, 7 aa, Artificial Sequence
  Synthetic
GTKFLAP

SEQ ID NO: 1655 - protein, 9 aa, Artificial Sequence
  Synthetic
ALYYSNRWV

SEQ ID NO: 1656 - protein, 125 aa, Artificial Sequence; identical to SEQ ID NO: 1474
  Synthetic

SEQ ID NO: 1657 - protein, 109 aa, Artificial Sequence; identical to SEQ ID NO: 545
  Synthetic

SEQ ID NO: 1658 - protein, 5 aa, Artificial Sequence
  Synthetic
KYAMN

SEQ ID NO: 1659 - protein, 19 aa, Artificial Sequence
  Synthetic
RIRSKYNNYATYYADSVKD

SEQ ID NO: 1660 - protein, 14 aa, Artificial Sequence
  Synthetic
HGNFGNSYISYWAY

SEQ ID NO: 1661 - protein, 14 aa, Artificial Sequence
  Synthetic
GSSTGAVTSGYYPN

SEQ ID NO: 1662 - protein, 7 aa, Artificial Sequence
  Synthetic
GTKFLAP

SEQ ID NO: 1663 - protein, 9 aa, Artificial Sequence
  Synthetic
ALWYSNRWV

SEQ ID NO: 1664 - protein, 125 aa, Artificial Sequence
  Synthetic
EVQLVESGGGLVQPGGSLKLSCAASGFTFNKYAMNWVRQAPGKGLEWVARIRSKYNNYATYYADSVKDRFTISRDDSKNTAYLQMNNLKTEDTAVYYCVRHGNFGNSYISYWAYWGQGTLVTVSS

SEQ ID NO: 1665 - protein, 109 aa, Artificial Sequence; identical to SEQ ID NO: 363
  Synthetic

SEQ ID NO: 1666 - protein, 125 aa, Artificial Sequence
  Synthetic
EVQLVESGGGLVQPGGSLKLSCAASGFTFNKYAMNWVRQAPGKGLEWVARIRSKYNNYATYYADSVKDRFTISRDDSKNTIYLQMNNLKTEDTAVYYCVRHGNFGNSYISYWAYWGQGTLVTVSS

SEQ ID NO: 1667 - protein, 109 aa, Artificial Sequence; identical to SEQ ID NO: 363
  Synthetic

SEQ ID NO: 1668 - protein, 125 aa, Artificial Sequence
  Synthetic
EVQLVESGGGLVQPGGSLKLSCAASGFTFNKYAMNWVRQAPGKGLEWVARIRSKYNNYATYYADSVKDRFTISRDDSKNTLYLQMNNLKTEDTAVYYCVRHGNFGNSYISYWAYWGQGTLVTVSS

SEQ ID NO: 1669 - protein, 109 aa, Artificial Sequence; identical to SEQ ID NO: 363
  Synthetic

SEQ ID NO: 1670 - protein, 125 aa, Artificial Sequence
  Synthetic
EVQLVESGGGLVQPGGSLKLSCAASGFTFNKYAMNWVRQAPGKGLEWVARIRSKYNNYATYYADSVKDRFTISRDDSKNTTYLQMNNLKTEDTAVYYCVRHGNFGNSYISYWAYWGQGTLVTVSS

SEQ ID NO: 1671 - protein, 109 aa, Artificial Sequence; identical to SEQ ID NO: 363
  Synthetic

SEQ ID NO: 1672 - protein, 125 aa, Artificial Sequence
  Synthetic
EVQLVESGGGLVQPGGSLKLSCAASGFTFNKYAMNWVRQAPGKGLEWVARIRSKYNNYATYYADSVKDRFTISRDDSKNTVYLQMNNLKTEDTAVYYCVRHGNFGNSYISYWAYWGQGTLVTVSS

SEQ ID NO: 1673 - protein, 109 aa, Artificial Sequence; identical to SEQ ID NO: 363
  Synthetic

SEQ ID NO: 1674 - protein, 125 aa, Artificial Sequence
  Synthetic
EVQLVESGGGLVQPGGSLKLSCAASGFTFNKYAMNWVRQAPGKGMEWVARIRSKYNNYATYYADSVKDRFTISRDDSKNTAYLQMNNLKTEDTAVYYCVRHGNFGNSYISYWAYWGQGTLVTVSS

SEQ ID NO: 1675 - protein, 109 aa, Artificial Sequence; identical to SEQ ID NO: 363
  Synthetic

SEQ ID NO: 1676 - protein, 125 aa, Artificial Sequence; identical to SEQ ID NO: 1674
  Synthetic

SEQ ID NO: 1677 - protein, 109 aa, Artificial Sequence; identical to SEQ ID NO: 375
  Synthetic

SEQ ID NO: 1678 - protein, 125 aa, Artificial Sequence; identical to SEQ ID NO: 1674
  Synthetic

SEQ ID NO: 1679 - protein, 109 aa, Artificial Sequence; identical to SEQ ID NO: 377
  Synthetic

SEQ ID NO: 1680 - protein, 125 aa, Artificial Sequence; identical to SEQ ID NO: 1674
  Synthetic

SEQ ID NO: 1681 - protein, 109 aa, Artificial Sequence; identical to SEQ ID NO: 379
  Synthetic

SEQ ID NO: 1682 - protein, 125 aa, Artificial Sequence
  Synthetic
EVQLVESGGGLVQPGGSLKLSCAASGFTFNKYAMNWVRQAPGKGVEWVARIRSKYNNYATYYADSVKDRFTISRDDSKNTAYLQMNNLKTEDTAVYYCVRHGNFGNSYISYWAYWGQGTLVTVSS

SEQ ID NO: 1683 - protein, 109 aa, Artificial Sequence; identical to SEQ ID NO: 363
  Synthetic

SEQ ID NO: 1684 - protein, 125 aa, Artificial Sequence; identical to SEQ ID NO: 1682
  Synthetic

SEQ ID NO: 1685 - protein, 109 aa, Artificial Sequence; identical to SEQ ID NO: 383
  Synthetic

SEQ ID NO: 1686 - protein, 125 aa, Artificial Sequence; identical to SEQ ID NO: 1682
  Synthetic

SEQ ID NO: 1687 - protein, 109 aa, Artificial Sequence; identical to SEQ ID NO: 385
  Synthetic

SEQ ID NO: 1688 - protein, 5 aa, Artificial Sequence
  Synthetic
KYAFN

SEQ ID NO: 1689 - protein, 19 aa, Artificial Sequence
  Synthetic
RIRSKYNNYATYYADSVKD

SEQ ID NO: 1690 - protein, 14 aa, Artificial Sequence
  Synthetic
HGNFGNSYISYWAY

SEQ ID NO: 1691 - protein, 14 aa, Artificial Sequence
  Synthetic
GSSTGAVTSGYYPN

SEQ ID NO: 1692 - protein, 7 aa, Artificial Sequence
  Synthetic
GTKFLAP

SEQ ID NO: 1693 - protein, 9 aa, Artificial Sequence
  Synthetic
ALWYSNRWV

SEQ ID NO: 1694 - protein, 125 aa, Artificial Sequence
  Synthetic
EVQLVESGGGLVQPGGSLKLSCAASGFTFNKYAFNWVRQAPGKGLEWVARIRSKYNNYATYYADSVKDRFTISRDDSKNTVYLQMNNLKTEDTAVYYCVRHGNFGNSYISYWAYWGQGTLVTVSS

SEQ ID NO: 1695 - protein, 109 aa, Artificial Sequence; identical to SEQ ID NO: 363
  Synthetic

SEQ ID NO: 1696 - protein, 5 aa, Artificial Sequence
  Synthetic
KYAIN

SEQ ID NO: 1697 - protein, 19 aa, Artificial Sequence
  Synthetic
RIRSKYNNYATYYADSVKD

SEQ ID NO: 1698 - protein, 14 aa, Artificial Sequence
  Synthetic
HGNFGNSYISYWAY

SEQ ID NO: 1699 - protein, 14 aa, Artificial Sequence
  Synthetic
GSSTGAVTSGYYPN

SEQ ID NO: 1700 - protein, 7 aa, Artificial Sequence
  Synthetic
GTKFLAP

SEQ ID NO: 1701 - protein, 9 aa, Artificial Sequence
  Synthetic
ALWYSNRWV

SEQ ID NO: 1702 - protein, 125 aa, Artificial Sequence
  Synthetic
EVQLVESGGGLVQPGGSLKLSCAASGFTFNKYAINWVRQAPGKGLEWVARIRSKYNNYATYYADSVKDRFTISRDDSKNTAYLQMNNLKTEDTAVYYCVRHGNFGNSYISYWAYWGQGTLVTVSS

SEQ ID NO: 1703 - protein, 109 aa, Artificial Sequence; identical to SEQ ID NO: 363
  Synthetic

SEQ ID NO: 1704 - protein, 125 aa, Artificial Sequence
  Synthetic
EVQLVESGGGLVQPGGSLKLSCAASGFTFNKYAINWVRQAPGKGLEWVARIRSKYNNYATYYADSVKDRFTISRDDSKNTLYLQMNNLKTEDTAVYYCVRHGNFGNSYISYWAYWGQGTLVTVSS

SEQ ID NO: 1705 - protein, 109 aa, Artificial Sequence; identical to SEQ ID NO: 363
  Synthetic

SEQ ID NO: 1706 - protein, 125 aa, Artificial Sequence
  Synthetic
EVQLVESGGGLVQPGGSLKLSCAASGFTFNKYAINWVRQAPGKGLEWVARIRSKYNNYATYYADSVKDRFTISRDDSKNTVYLQMNNLKTEDTAVYYCVRHGNFGNSYISYWAYWGQGTLVTVSS

SEQ ID NO: 1707 - protein, 109 aa, Artificial Sequence; identical to SEQ ID NO: 363
  Synthetic

SEQ ID NO: 1708 - protein, 125 aa, Artificial Sequence; identical to SEQ ID NO: 1706
  Synthetic

SEQ ID NO: 1709 - protein, 109 aa, Artificial Sequence; identical to SEQ ID NO: 375
  Synthetic

SEQ ID NO: 1710 - protein, 125 aa, Artificial Sequence; identical to SEQ ID NO: 1706
  Synthetic

SEQ ID NO: 1711 - protein, 109 aa, Artificial Sequence; identical to SEQ ID NO: 377
  Synthetic

SEQ ID NO: 1712 - protein, 125 aa, Artificial Sequence
  Synthetic
EVQLVESGGGLVQPGGSLKLSCAASGFTFNKYAINWVRQAPGKGVEWVARIRSKYNNYATYYADSVKDRFTISRDDSKNTVYLQMNNLKTEDTAVYYCVRHGNFGNSYISYWAYWGQGTLVTVSS

SEQ ID NO: 1713 - protein, 109 aa, Artificial Sequence; identical to SEQ ID NO: 411
  Synthetic

SEQ ID NO: 1714 - protein, 125 aa, Artificial Sequence; identical to SEQ ID NO: 1702
  Synthetic

SEQ ID NO: 1715 - protein, 109 aa, Artificial Sequence; identical to SEQ ID NO: 375
  Synthetic

SEQ ID NO: 1716 - protein, 125 aa, Artificial Sequence
  Synthetic
EVQLVESGGGLVQPGGSLKLSCAASGFTFNKYAINWVREAPGKGLEWVARIRSKYNNYATYYADSVKDRFTISRDDSKNTVYLQMNNLKTEDTAVYYCVRHGNFGNSYISYWAYWGQGTLVTVSS

SEQ ID NO: 1717 - protein, 109 aa, Artificial Sequence; identical to SEQ ID NO: 375
  Synthetic

SEQ ID NO: 1718 - protein, 5 aa, Artificial Sequence
  Synthetic
KYAVN

SEQ ID NO: 1719 - protein, 19 aa, Artificial Sequence
  Synthetic
RIRSKYNNYATYYADSVKD

SEQ ID NO: 1720 - protein, 14 aa, Artificial Sequence
  Synthetic
HGNFGNSYISYWAY

SEQ ID NO: 1721 - protein, 14 aa, Artificial Sequence
  Synthetic
GSSTGAVTSGYYPN

SEQ ID NO: 1722 - protein, 7 aa, Artificial Sequence
  Synthetic
GTKFLAP

SEQ ID NO: 1723 - protein, 9 aa, Artificial Sequence
  Synthetic
ALWYSNRWV

SEQ ID NO: 1724 - protein, 125 aa, Artificial Sequence
  Synthetic
EVQLVESGGGLVQPGGSLKLSCAASGFTFNKYAVNWVRQAPGKGLEWVARIRSKYNNYATYYADSVKDRFTISRDDSKNTAYLQMNNLKTEDTAVYYCVRHGNFGNSYISYWAYWGQGTLVTVSS

SEQ ID NO: 1725 - protein, 109 aa, Artificial Sequence; identical to SEQ ID NO: 363
  Synthetic

SEQ ID NO: 1726 - protein, 125 aa, Artificial Sequence
  Synthetic
EVQLVESGGGLVQPGGSLKLSCAASGFTFNKYAMNWVRDAPGKGLEWVARIRSKYNNYATYYADSVKDRFTISRDDSKNTAYLQMNNLKTEDTAVYYCVRHGNFGNSYISYWAYWGQGTLVTVSS

SEQ ID NO: 1727 - protein, 109 aa, Artificial Sequence; identical to SEQ ID NO: 363
  Synthetic

SEQ ID NO: 1728 - protein, 125 aa, Artificial Sequence; identical to SEQ ID NO: 1726
  Synthetic

SEQ ID NO: 1729 - protein, 109 aa, Artificial Sequence; identical to SEQ ID NO: 375
  Synthetic

SEQ ID NO: 1730 - protein, 125 aa, Artificial Sequence; identical to SEQ ID NO: 1726
  Synthetic

SEQ ID NO: 1731 - protein, 109 aa, Artificial Sequence; identical to SEQ ID NO: 429
  Synthetic

SEQ ID NO: 1732 - protein, 125 aa, Artificial Sequence; identical to SEQ ID NO: 1726
  Synthetic

SEQ ID NO: 1733 - protein, 109 aa, Artificial Sequence; identical to SEQ ID NO: 377
  Synthetic

SEQ ID NO: 1734 - protein, 125 aa, Artificial Sequence; identical to SEQ ID NO: 1726
  Synthetic

SEQ ID NO: 1735 - protein, 109 aa, Artificial Sequence; identical to SEQ ID NO: 379
  Synthetic

SEQ ID NO: 1736 - protein, 125 aa, Artificial Sequence; identical to SEQ ID NO: 1726
  Synthetic

SEQ ID NO: 1737 - protein, 109 aa, Artificial Sequence; identical to SEQ ID NO: 435
  Synthetic

SEQ ID NO: 1738 - protein, 125 aa, Artificial Sequence; identical to SEQ ID NO: 1726
  Synthetic

SEQ ID NO: 1739 - protein, 109 aa, Artificial Sequence; identical to SEQ ID NO: 437
  Synthetic

SEQ ID NO: 1740 - protein, 125 aa, Artificial Sequence
  Synthetic
EVQLVESGGGLVQPGGSLKLSCAASGFTFNKYAMNWVREAPGKGLEWVARIRSKYNNYATYYADSVKDRFTISRDDSKNTAYLQMNNLKTEDTAVYYCVRHGNFGNSYISYWAYWGQGTLVTVSS

SEQ ID NO: 1741 - protein, 109 aa, Artificial Sequence; identical to SEQ ID NO: 363
  Synthetic

SEQ ID NO: 1742 - protein, 125 aa, Artificial Sequence; identical to SEQ ID NO: 1740
  Synthetic

SEQ ID NO: 1743 - protein, 109 aa, Artificial Sequence; identical to SEQ ID NO: 375
  Synthetic

SEQ ID NO: 1744 - protein, 125 aa, Artificial Sequence; identical to SEQ ID NO: 1740
  Synthetic

SEQ ID NO: 1745 - protein, 109 aa, Artificial Sequence; identical to SEQ ID NO: 429
  Synthetic

SEQ ID NO: 1746 - protein, 125 aa, Artificial Sequence; identical to SEQ ID NO: 1740
  Synthetic

SEQ ID NO: 1747 - protein, 109 aa, Artificial Sequence; identical to SEQ ID NO: 377
  Synthetic

SEQ ID NO: 1748 - protein, 125 aa, Artificial Sequence; identical to SEQ ID NO: 1740
  Synthetic

SEQ ID NO: 1749 - protein, 109 aa, Artificial Sequence; identical to SEQ ID NO: 379
  Synthetic

SEQ ID NO: 1750 - protein, 125 aa, Artificial Sequence; identical to SEQ ID NO: 1740
  Synthetic

SEQ ID NO: 1751 - protein, 109 aa, Artificial Sequence; identical to SEQ ID NO: 435
  Synthetic

SEQ ID NO: 1752 - protein, 125 aa, Artificial Sequence; identical to SEQ ID NO: 1740
  Synthetic

SEQ ID NO: 1753 - protein, 109 aa, Artificial Sequence; identical to SEQ ID NO: 437
  Synthetic

SEQ ID NO: 1754 - protein, 125 aa, Artificial Sequence
  Synthetic
EVQLVESGGGLVQPGGSLKLSCAASGFTFNKYAMNWVRKAPGKGLEWVARIRSKYNNYATYYADSVKDRFTISRDDSKNTAYLQMNNLKTEDTAVYYCVRHGNFGNSYISYWAYWGQGTLVTVSS

SEQ ID NO: 1755 - protein, 109 aa, Artificial Sequence; identical to SEQ ID NO: 363
  Synthetic

SEQ ID NO: 1756 - protein, 125 aa, Artificial Sequence
  Synthetic
EVQLVESGGGLVQPGGSLKLSCAASGFTFNKYAMNWVRRAPGKGLEWVARIRSKYNNYATYYADSVKDRFTISRDDSKNTAYLQMNNLKTEDTAVYYCVRHGNFGNSYISYWAYWGQGTLVTVSS

SEQ ID NO: 1757 - protein, 109 aa, Artificial Sequence; identical to SEQ ID NO: 363
  Synthetic

SEQ ID NO: 1758 - protein, 125 aa, Artificial Sequence
  Synthetic
EVQLVESGGGLVQPGGSLKLSCAASGFTFNKYAMNWVRQAPGKGLEWVARIRSKYNNYATYYADSVKDRFTISRDDSKNTAYLQMNNLKTEDTAVYYCARHGNFGNSYISYWAYWGQGTLVTVSS

SEQ ID NO: 1759 - protein, 109 aa, Artificial Sequence; identical to SEQ ID NO: 363
  Synthetic

SEQ ID NO: 1760 - protein, 125 aa, Artificial Sequence
  Synthetic
EVQLVESGGGLVQPGGSLKLSCAASGFTFNKYAMNWVRQAPGKGLEWVARIRSKYNNYATYYADSVKDRFTISRDDSKNTAYLQMNNLKTEDTAVYYCLRHGNFGNSYISYWAYWGQGTLVTVSS

SEQ ID NO: 1761 - protein, 109 aa, Artificial Sequence; identical to SEQ ID NO: 363
  Synthetic

SEQ ID NO: 1762 - protein, 5 aa, Artificial Sequence
  Synthetic
KYAMN

SEQ ID NO: 1763 - protein, 19 aa, Artificial Sequence
  Synthetic
RIRSKYNNYATYYADSVKD

SEQ ID NO: 1764 - protein, 14 aa, Artificial Sequence
  Synthetic
HGNFGNSYISYFAY

SEQ ID NO: 1765 - protein, 14 aa, Artificial Sequence
  Synthetic
GSSTGAVTSGYYPN

SEQ ID NO: 1766 - protein, 7 aa, Artificial Sequence
  Synthetic
GTKFLAP

SEQ ID NO: 1767 - protein, 9 aa, Artificial Sequence
  Synthetic
ALWYSNRWV

SEQ ID NO: 1768 - protein, 125 aa, Artificial Sequence
  Synthetic
EVQLVESGGGLVQPGGSLKLSCAASGFTFNKYAMNWVRQAPGKGLEWVARIRSKYNNYATYYADSVKDRFTISRDDSKNTAYLQMNNLKTEDTAVYYCVRHGNFGNSYISYFAYWGQGTLVTVSS

SEQ ID NO: 1769 - protein, 109 aa, Artificial Sequence; identical to SEQ ID NO: 363
  Synthetic

SEQ ID NO: 1770 - protein, 125 aa, Artificial Sequence; identical to SEQ ID NO: 1768
  Synthetic

SEQ ID NO: 1771 - protein, 109 aa, Artificial Sequence; identical to SEQ ID NO: 469
  Synthetic

SEQ ID NO: 1772 - protein, 125 aa, Artificial Sequence; identical to SEQ ID NO: 1768
  Synthetic

SEQ ID NO: 1773 - protein, 109 aa, Artificial Sequence; identical to SEQ ID NO: 471
  Synthetic

SEQ ID NO: 1774 - protein, 5 aa, Artificial Sequence
  Synthetic
KYAIN

SEQ ID NO: 1775 - protein, 19 aa, Artificial Sequence
  Synthetic
RIRSKYNNYATYYADAVKD

SEQ ID NO: 1776 - protein, 14 aa, Artificial Sequence
  Synthetic
AGNFGSSYISYWAY

SEQ ID NO: 1777 - protein, 14 aa, Artificial Sequence
  Synthetic
GSSTGAVTSGYYPN

SEQ ID NO: 1778 - protein, 7 aa, Artificial Sequence
  Synthetic
GTKFLAP

SEQ ID NO: 1779 - protein, 9 aa, Artificial Sequence
  Synthetic
ALWYSNRWV

SEQ ID NO: 1780 - protein, 125 aa, Artificial Sequence
  Synthetic
EVQLVESGGGLVQPGGSLKLSCAASGFTFNKYAINWVRQAPGKGLEWVARIRSKYNNYATYYADAVKDRFTISRDDSKNTVYLQMNNLKTEDTAVYYCARAGNFGSSYISYWAYWGQGTLVTVSS

SEQ ID NO: 1781 - protein, 109 aa, Artificial Sequence; identical to SEQ ID NO: 479
  Synthetic

SEQ ID NO: 1782 - protein, 5 aa, Artificial Sequence
  Synthetic
KYAMN

SEQ ID NO: 1783 - protein, 19 aa, Artificial Sequence
  Synthetic
RIRSKYNNYATYYAEAVKG

SEQ ID NO: 1784 - protein, 14 aa, Artificial Sequence
  Synthetic
NENIGTSYISYWAY

SEQ ID NO: 1785 - protein, 14 aa, Artificial Sequence
  Synthetic
GSSTGAVTSGYYPN

SEQ ID NO: 1786 - protein, 7 aa, Artificial Sequence
  Synthetic
GTKFLAP

SEQ ID NO: 1787 - protein, 9 aa, Artificial Sequence
  Synthetic
ALWYSNRWV

SEQ ID NO: 1788 - protein, 125 aa, Artificial Sequence; identical to SEQ ID NO: 140
  Synthetic

SEQ ID NO: 1789 - protein, 109 aa, Artificial Sequence; identical to SEQ ID NO: 487
  Synthetic

SEQ ID NO: 1790 - protein, 5 aa, Artificial Sequence
  Synthetic
KYAMN

SEQ ID NO: 1791 - protein, 19 aa, Artificial Sequence
  Synthetic
RIRSKYNNYATYYADAVKD

SEQ ID NO: 1792 - protein, 14 aa, Artificial Sequence
  Synthetic
AGNFGSSYISYFAY

SEQ ID NO: 1793 - protein, 14 aa, Artificial Sequence
  Synthetic
GSSTGAVTSGYYPN

SEQ ID NO: 1794 - protein, 7 aa, Artificial Sequence
  Synthetic
GTKFLAP

SEQ ID NO: 1795 - protein, 9 aa, Artificial Sequence
  Synthetic
ALYYSNRWV

SEQ ID NO: 1796 - protein, 125 aa, Artificial Sequence
  Synthetic
EVQLVESGGGLVQPGGSLKLSCAASGFTFNKYAMNWVRQAPGKGMEWVARIRSKYNNYATYYADAVKDRFTISRDDSKNTLYLQMNNLKTEDTAVYYCVRAGNFGSSYISYFAYWGQGTLVTVSS

SEQ ID NO: 1797 - protein, 109 aa, Artificial Sequence; identical to SEQ ID NO: 495
  Synthetic

SEQ ID NO: 1798 - protein, 5 aa, Artificial Sequence
  Synthetic
KYAMN

SEQ ID NO: 1799 - protein, 19 aa, Artificial Sequence
  Synthetic
RIRSKYNNYATYYADAVKD

SEQ ID NO: 1800 - protein, 14 aa, Artificial Sequence
  Synthetic
AGNFGTSYISYWAY

SEQ ID NO: 1801 - protein, 14 aa, Artificial Sequence
  Synthetic
GSSTGAVTSGYYPN

SEQ ID NO: 1802 - protein, 7 aa, Artificial Sequence
  Synthetic
GTKFLAP

SEQ ID NO: 1803 - protein, 9 aa, Artificial Sequence
  Synthetic
ALWYSNRWV

SEQ ID NO: 1804 - protein, 125 aa, Artificial Sequence
  Synthetic
EVQLVESGGGLVQPGGSLKLSCAASGFTFNKYAMNWVRQAPGKGMEWVARIRSKYNNYATYYADAVKDRFTISRDDSKNTLYLQMNNLKTEDTAVYYCVRAGNFGTSYISYWAYWGQGTLVTVSS

SEQ ID NO: 1805 - protein, 109 aa, Artificial Sequence; identical to SEQ ID NO: 479
  Synthetic

SEQ ID NO: 1806 - protein, 5 aa, Artificial Sequence
  Synthetic
KYAIN

SEQ ID NO: 1807 - protein, 19 aa, Artificial Sequence
  Synthetic
RIRSKYNNYATYYADAVKD

SEQ ID NO: 1808 - protein, 14 aa, Artificial Sequence
  Synthetic
NANFGTSYISYFAY

SEQ ID NO: 1809 - protein, 14 aa, Artificial Sequence
  Synthetic
GSSTGAVTSGYYPN

SEQ ID NO: 1810 - protein, 7 aa, Artificial Sequence
  Synthetic
GTKFLAP

SEQ ID NO: 1811 - protein, 9 aa, Artificial Sequence
  Synthetic
ALWYSNRWV

SEQ ID NO: 1812 - protein, 125 aa, Artificial Sequence; identical to SEQ ID NO: 164
  Synthetic

SEQ ID NO: 1813 - protein, 109 aa, Artificial Sequence; identical to SEQ ID NO: 379
  Synthetic

SEQ ID NO: 1814 - protein, 125 aa, Artificial Sequence; identical to SEQ ID NO: 1664
  Synthetic

SEQ ID NO: 1815 - protein, 109 aa, Artificial Sequence; identical to SEQ ID NO: 513
  Synthetic

SEQ ID NO: 1816 - protein, 125 aa, Artificial Sequence; identical to SEQ ID NO: 1664
  Synthetic

SEQ ID NO: 1817 - protein, 109 aa, Artificial Sequence; identical to SEQ ID NO: 515
  Synthetic

SEQ ID NO: 1818 - protein, 125 aa, Artificial Sequence; identical to SEQ ID NO: 1664
  Synthetic

SEQ ID NO: 1819 - protein, 109 aa, Artificial Sequence; identical to SEQ ID NO: 517
  Synthetic

SEQ ID NO: 1820 - protein, 125 aa, Artificial Sequence; identical to SEQ ID NO: 1664
  Synthetic

SEQ ID NO: 1821 - protein, 109 aa, Artificial Sequence; identical to SEQ ID NO: 519
  Synthetic

SEQ ID NO: 1822 - protein, 125 aa, Artificial Sequence; identical to SEQ ID NO: 1664
  Synthetic

SEQ ID NO: 1823 - protein, 109 aa, Artificial Sequence; identical to SEQ ID NO: 521
  Synthetic

SEQ ID NO: 1824 - protein, 125 aa, Artificial Sequence; identical to SEQ ID NO: 1664
  Synthetic

SEQ ID NO: 1825 - protein, 109 aa, Artificial Sequence; identical to SEQ ID NO: 377
  Synthetic

SEQ ID NO: 1826 - protein, 5 aa, Artificial Sequence
  Synthetic
KYAMN

SEQ ID NO: 1827 - protein, 19 aa, Artificial Sequence
  Synthetic
RIRSKYNNYATYYADSVKD

SEQ ID NO: 1828 - protein, 14 aa, Artificial Sequence
  Synthetic
HGNFGNSYISYWAY

SEQ ID NO: 1829 - protein, 14 aa, Artificial Sequence
  Synthetic
GSSTGAVTSGYYPN

SEQ ID NO: 1830 - protein, 7 aa, Artificial Sequence
  Synthetic
GTKFLAP

SEQ ID NO: 1831 - protein, 9 aa, Artificial Sequence
  Synthetic
LLWYSNRWV

SEQ ID NO: 1832 - protein, 125 aa, Artificial Sequence; identical to SEQ ID NO: 1664
  Synthetic

SEQ ID NO: 1833 - protein, 109 aa, Artificial Sequence; identical to SEQ ID NO: 531
  Synthetic

SEQ ID NO: 1834 - protein, 125 aa, Artificial Sequence; identical to SEQ ID NO: 1664
  Synthetic

SEQ ID NO: 1835 - protein, 109 aa, Artificial Sequence; identical to SEQ ID NO: 469
  Synthetic

SEQ ID NO: 1836 - protein, 125 aa, Artificial Sequence; identical to SEQ ID NO: 1664
  Synthetic

SEQ ID NO: 1837 - protein, 109 aa, Artificial Sequence; identical to SEQ ID NO: 471
  Synthetic

SEQ ID NO: 1838 - protein, 125 aa, Artificial Sequence; identical to SEQ ID NO: 1664
  Synthetic

SEQ ID NO: 1839 - protein, 109 aa, Artificial Sequence; identical to SEQ ID NO: 537
  Synthetic

SEQ ID NO: 1840 - protein, 5 aa, Artificial Sequence
  Synthetic
KYAMN

SEQ ID NO: 1841 - protein, 19 aa, Artificial Sequence
  Synthetic
RIRSKYNNYATYYADSVKD

SEQ ID NO: 1842 - protein, 14 aa, Artificial Sequence
  Synthetic
HGNFGNSYISYWAY

SEQ ID NO: 1843 - protein, 14 aa, Artificial Sequence
  Synthetic
GSSTGAVTSGYYPN

SEQ ID NO: 1844 - protein, 7 aa, Artificial Sequence
  Synthetic
GTKFLAP

SEQ ID NO: 1845 - protein, 9 aa, Artificial Sequence
  Synthetic
ALYYSNRWV

SEQ ID NO: 1846 - protein, 125 aa, Artificial Sequence; identical to SEQ ID NO: 1664
  Synthetic

SEQ ID NO: 1847 - protein, 109 aa, Artificial Sequence; identical to SEQ ID NO: 545
  Synthetic

SEQ ID NO: 1848 - protein, 5 aa, Artificial Sequence
  Synthetic
KYAMN

SEQ ID NO: 1849 - protein, 19 aa, Artificial Sequence
  Synthetic
RIRSKYNNYATYYADSVKD

SEQ ID NO: 1850 - protein, 14 aa, Artificial Sequence
  Synthetic
HGNFGNSYISYWAY

SEQ ID NO: 1851 - protein, 14 aa, Artificial Sequence
  Synthetic
GSSTGAVTSGNYPN

SEQ ID NO: 1852 - protein, 7 aa, Artificial Sequence
  Synthetic
GTKFLAP

SEQ ID NO: 1853 - protein, 9 aa, Artificial Sequence
  Synthetic
VLWYSNRWV

SEQ ID NO: 1854 - protein, 125 aa, Artificial Sequence; identical to SEQ ID NO: 1664
  Synthetic

SEQ ID NO: 1855 - protein, 109 aa, Artificial Sequence; identical to SEQ ID NO: 731
  Synthetic

SEQ ID NO: 1856 - protein, 125 aa, Artificial Sequence; identical to SEQ ID NO: 1666
  Synthetic

SEQ ID NO: 1857 - protein, 109 aa, Artificial Sequence; identical to SEQ ID NO: 731
  Synthetic

SEQ ID NO: 1858 - protein, 125 aa, Artificial Sequence; identical to SEQ ID NO: 1668
  Synthetic

SEQ ID NO: 1859 - protein, 109 aa, Artificial Sequence; identical to SEQ ID NO: 731
  Synthetic

SEQ ID NO: 1860 - protein, 125 aa, Artificial Sequence; identical to SEQ ID NO: 1670
  Synthetic

SEQ ID NO: 1861 - protein, 109 aa, Artificial Sequence; identical to SEQ ID NO: 731
  Synthetic

SEQ ID NO: 1862 - protein, 125 aa, Artificial Sequence; identical to SEQ ID NO: 1672
  Synthetic

SEQ ID NO: 1863 - protein, 109 aa, Artificial Sequence; identical to SEQ ID NO: 731
  Synthetic

SEQ ID NO: 1864 - protein, 125 aa, Artificial Sequence; identical to SEQ ID NO: 1674
  Synthetic

SEQ ID NO: 1865 - protein, 109 aa, Artificial Sequence; identical to SEQ ID NO: 731
  Synthetic

SEQ ID NO: 1866 - protein, 125 aa, Artificial Sequence; identical to SEQ ID NO: 1674
  Synthetic

SEQ ID NO: 1867 - protein, 109 aa, Artificial Sequence; identical to SEQ ID NO: 743
  Synthetic

SEQ ID NO: 1868 - protein, 125 aa, Artificial Sequence; identical to SEQ ID NO: 1674
  Synthetic

SEQ ID NO: 1869 - protein, 109 aa, Artificial Sequence; identical to SEQ ID NO: 745
  Synthetic

SEQ ID NO: 1870 - protein, 125 aa, Artificial Sequence; identical to SEQ ID NO: 1674
  Synthetic

SEQ ID NO: 1871 - protein, 109 aa, Artificial Sequence; identical to SEQ ID NO: 747
  Synthetic

SEQ ID NO: 1872 - protein, 125 aa, Artificial Sequence; identical to SEQ ID NO: 1682
  Synthetic

SEQ ID NO: 1873 - protein, 109 aa, Artificial Sequence; identical to SEQ ID NO: 731
  Synthetic

SEQ ID NO: 1874 - protein, 125 aa, Artificial Sequence; identical to SEQ ID NO: 1682
  Synthetic

SEQ ID NO: 1875 - protein, 109 aa, Artificial Sequence; identical to SEQ ID NO: 751
  Synthetic

SEQ ID NO: 1876 - protein, 125 aa, Artificial Sequence; identical to SEQ ID NO: 1682
  Synthetic

SEQ ID NO: 1877 - protein, 109 aa, Artificial Sequence; identical to SEQ ID NO: 753
  Synthetic

SEQ ID NO: 1878 - protein, 5 aa, Artificial Sequence
  Synthetic
KYAFN

SEQ ID NO: 1879 - protein, 19 aa, Artificial Sequence
  Synthetic
RIRSKYNNYATYYADSVKD

SEQ ID NO: 1880 - protein, 14 aa, Artificial Sequence
  Synthetic
HGNFGNSYISYWAY

SEQ ID NO: 1881 - protein, 14 aa, Artificial Sequence
  Synthetic
GSSTGAVTSGNYPN

SEQ ID NO: 1882 - protein, 7 aa, Artificial Sequence
  Synthetic
GTKFLAP

SEQ ID NO: 1883 - protein, 9 aa, Artificial Sequence
  Synthetic
VLWYSNRWV

SEQ ID NO: 1884 - protein, 125 aa, Artificial Sequence; identical to SEQ ID NO: 1694
  Synthetic

SEQ ID NO: 1885 - protein, 109 aa, Artificial Sequence; identical to SEQ ID NO: 731
  Synthetic

SEQ ID NO: 1886 - protein, 5 aa, Artificial Sequence
  Synthetic
KYAIN

SEQ ID NO: 1887 - protein, 19 aa, Artificial Sequence
  Synthetic
RIRSKYNNYATYYADSVKD

SEQ ID NO: 1888 - protein, 14 aa, Artificial Sequence
  Synthetic
HGNFGNSYISYWAY

SEQ ID NO: 1889 - protein, 14 aa, Artificial Sequence
  Synthetic
GSSTGAVTSGNYPN

SEQ ID NO: 1890 - protein, 7 aa, Artificial Sequence
  Synthetic
GTKFLAP

SEQ ID NO: 1891 - protein, 9 aa, Artificial Sequence
  Synthetic
VLWYSNRWV

SEQ ID NO: 1892 - protein, 125 aa, Artificial Sequence; identical to SEQ ID NO: 1702
  Synthetic

SEQ ID NO: 1893 - protein, 109 aa, Artificial Sequence; identical to SEQ ID NO: 731
  Synthetic

SEQ ID NO: 1894 - protein, 125 aa, Artificial Sequence; identical to SEQ ID NO: 1704
  Synthetic

SEQ ID NO: 1895 - protein, 109 aa, Artificial Sequence; identical to SEQ ID NO: 731
  Synthetic

SEQ ID NO: 1896 - protein, 125 aa, Artificial Sequence; identical to SEQ ID NO: 1706
  Synthetic

SEQ ID NO: 1897 - protein, 109 aa, Artificial Sequence; identical to SEQ ID NO: 731
  Synthetic

SEQ ID NO: 1898 - protein, 125 aa, Artificial Sequence; identical to SEQ ID NO: 1706
  Synthetic

SEQ ID NO: 1899 - protein, 109 aa, Artificial Sequence; identical to SEQ ID NO: 743
  Synthetic

SEQ ID NO: 1900 - protein, 125 aa, Artificial Sequence; identical to SEQ ID NO: 1706
  Synthetic

SEQ ID NO: 1901 - protein, 109 aa, Artificial Sequence; identical to SEQ ID NO: 745
  Synthetic

SEQ ID NO: 1902 - protein, 125 aa, Artificial Sequence; identical to SEQ ID NO: 1712
  Synthetic

SEQ ID NO: 1903 - protein, 109 aa, Artificial Sequence; identical to SEQ ID NO: 779
  Synthetic

SEQ ID NO: 1904 - protein, 125 aa, Artificial Sequence; identical to SEQ ID NO: 1702
  Synthetic

SEQ ID NO: 1905 - protein, 109 aa, Artificial Sequence; identical to SEQ ID NO: 743
  Synthetic

SEQ ID NO: 1906 - protein, 125 aa, Artificial Sequence; identical to SEQ ID NO: 1716
  Synthetic

SEQ ID NO: 1907 - protein, 109 aa, Artificial Sequence; identical to SEQ ID NO: 743
  Synthetic

SEQ ID NO: 1908 - protein, 5 aa, Artificial Sequence
  Synthetic
KYAVN

SEQ ID NO: 1909 - protein, 19 aa, Artificial Sequence
  Synthetic
RIRSKYNNYATYYADSVKD

SEQ ID NO: 1910 - protein, 14 aa, Artificial Sequence
  Synthetic
HGNFGNSYISYWAY

SEQ ID NO: 1911 - protein, 14 aa, Artificial Sequence
  Synthetic
GSSTGAVTSGNYPN

SEQ ID NO: 1912 - protein, 7 aa, Artificial Sequence
  Synthetic
GTKFLAP

SEQ ID NO: 1913 - protein, 9 aa, Artificial Sequence
  Synthetic
VLWYSNRWV

SEQ ID NO: 1914 - protein, 125 aa, Artificial Sequence; identical to SEQ ID NO: 1724
  Synthetic

SEQ ID NO: 1915 - protein, 109 aa, Artificial Sequence; identical to SEQ ID NO: 731
  Synthetic

SEQ ID NO: 1916 - protein, 125 aa, Artificial Sequence; identical to SEQ ID NO: 1726
  Synthetic

SEQ ID NO: 1917 - protein, 109 aa, Artificial Sequence; identical to SEQ ID NO: 731
  Synthetic

SEQ ID NO: 1918 - protein, 125 aa, Artificial Sequence; identical to SEQ ID NO: 1726
  Synthetic

SEQ ID NO: 1919 - protein, 109 aa, Artificial Sequence; identical to SEQ ID NO: 743
  Synthetic

SEQ ID NO: 1920 - protein, 125 aa, Artificial Sequence; identical to SEQ ID NO: 1726
  Synthetic

SEQ ID NO: 1921 - protein, 109 aa, Artificial Sequence; identical to SEQ ID NO: 745
  Synthetic

SEQ ID NO: 1922 - protein, 125 aa, Artificial Sequence; identical to SEQ ID NO: 1726
  Synthetic

SEQ ID NO: 1923 - protein, 109 aa, Artificial Sequence; identical to SEQ ID NO: 747
  Synthetic

SEQ ID NO: 1924 - protein, 125 aa, Artificial Sequence; identical to SEQ ID NO: 1726
  Synthetic

SEQ ID NO: 1925 - protein, 109 aa, Artificial Sequence; identical to SEQ ID NO: 803
  Synthetic

SEQ ID NO: 1926 - protein, 125 aa, Artificial Sequence; identical to SEQ ID NO: 1726
  Synthetic

SEQ ID NO: 1927 - protein, 109 aa, Artificial Sequence; identical to SEQ ID NO: 805
  Synthetic

SEQ ID NO: 1928 - protein, 125 aa, Artificial Sequence; identical to SEQ ID NO: 1726
  Synthetic

SEQ ID NO: 1929 - protein, 109 aa, Artificial Sequence; identical to SEQ ID NO: 797
  Synthetic

SEQ ID NO: 1930 - protein, 125 aa, Artificial Sequence; identical to SEQ ID NO: 1740
  Synthetic

SEQ ID NO: 1931 - protein, 109 aa, Artificial Sequence; identical to SEQ ID NO: 731
  Synthetic

SEQ ID NO: 1932 - protein, 125 aa, Artificial Sequence; identical to SEQ ID NO: 1740
  Synthetic

SEQ ID NO: 1933 - protein, 109 aa, Artificial Sequence; identical to SEQ ID NO: 743
  Synthetic

SEQ ID NO: 1934 - protein, 125 aa, Artificial Sequence; identical to SEQ ID NO: 1740
  Synthetic

SEQ ID NO: 1935 - protein, 109 aa, Artificial Sequence; identical to SEQ ID NO: 797
  Synthetic

SEQ ID NO: 1936 - protein, 125 aa, Artificial Sequence; identical to SEQ ID NO: 1740
  Synthetic

SEQ ID NO: 1937 - protein, 109 aa, Artificial Sequence; identical to SEQ ID NO: 745
  Synthetic

SEQ ID NO: 1938 - protein, 125 aa, Artificial Sequence; identical to SEQ ID NO: 1740
  Synthetic

SEQ ID NO: 1939 - protein, 109 aa, Artificial Sequence; identical to SEQ ID NO: 747
  Synthetic

SEQ ID NO: 1940 - protein, 125 aa, Artificial Sequence; identical to SEQ ID NO: 1740
  Synthetic

SEQ ID NO: 1941 - protein, 109 aa, Artificial Sequence; identical to SEQ ID NO: 803
  Synthetic

SEQ ID NO: 1942 - protein, 125 aa, Artificial Sequence; identical to SEQ ID NO: 1740
  Synthetic

SEQ ID NO: 1943 - protein, 109 aa, Artificial Sequence; identical to SEQ ID NO: 805
  Synthetic

SEQ ID NO: 1944 - protein, 125 aa, Artificial Sequence; identical to SEQ ID NO: 1754
  Synthetic

SEQ ID NO: 1945 - protein, 109 aa, Artificial Sequence; identical to SEQ ID NO: 731
  Synthetic

SEQ ID NO: 1946 - protein, 125 aa, Artificial Sequence; identical to SEQ ID NO: 1756
  Synthetic

SEQ ID NO: 1947 - protein, 109 aa, Artificial Sequence; identical to SEQ ID NO: 731
  Synthetic

SEQ ID NO: 1948 - protein, 125 aa, Artificial Sequence; identical to SEQ ID NO: 1758
  Synthetic

SEQ ID NO: 1949 - protein, 109 aa, Artificial Sequence; identical to SEQ ID NO: 731
  Synthetic

SEQ ID NO: 1950 - protein, 125 aa, Artificial Sequence; identical to SEQ ID NO: 1760
  Synthetic

SEQ ID NO: 1951 - protein, 109 aa, Artificial Sequence; identical to SEQ ID NO: 731
  Synthetic

SEQ ID NO: 1952 - protein, 5 aa, Artificial Sequence
  Synthetic
KYAMN

SEQ ID NO: 1953 - protein, 19 aa, Artificial Sequence
  Synthetic
RIRSKYNNYATYYADSVKD

SEQ ID NO: 1954 - protein, 14 aa, Artificial Sequence
  Synthetic
HGNFGNSYISYFAY

SEQ ID NO: 1955 - protein, 14 aa, Artificial Sequence
  Synthetic
GSSTGAVTSGNYPN

SEQ ID NO: 1956 - protein, 7 aa, Artificial Sequence
  Synthetic
GTKFLAP

SEQ ID NO: 1957 - protein, 9 aa, Artificial Sequence
  Synthetic
VLWYSNRWV

SEQ ID NO: 1958 - protein, 125 aa, Artificial Sequence; identical to SEQ ID NO: 1768
  Synthetic

SEQ ID NO: 1959 - protein, 109 aa, Artificial Sequence; identical to SEQ ID NO: 731
  Synthetic

SEQ ID NO: 1960 - protein, 125 aa, Artificial Sequence; identical to SEQ ID NO: 1768
  Synthetic

SEQ ID NO: 1961 - protein, 109 aa, Artificial Sequence; identical to SEQ ID NO: 837
  Synthetic

SEQ ID NO: 1962 - protein, 125 aa, Artificial Sequence; identical to SEQ ID NO: 1768
  Synthetic

SEQ ID NO: 1963 - protein, 109 aa, Artificial Sequence; identical to SEQ ID NO: 839
  Synthetic

SEQ ID NO: 1964 - protein, 125 aa, Artificial Sequence; identical to SEQ ID NO: 1664
  Synthetic

SEQ ID NO: 1965 - protein, 109 aa, Artificial Sequence; identical to SEQ ID NO: 881
  Synthetic

SEQ ID NO: 1966 - protein, 125 aa, Artificial Sequence; identical to SEQ ID NO: 1664
  Synthetic

SEQ ID NO: 1967 - protein, 109 aa, Artificial Sequence; identical to SEQ ID NO: 883
  Synthetic

SEQ ID NO: 1968 - protein, 125 aa, Artificial Sequence; identical to SEQ ID NO: 1664
  Synthetic

SEQ ID NO: 1969 - protein, 109 aa, Artificial Sequence; identical to SEQ ID NO: 885
  Synthetic

SEQ ID NO: 1970 - protein, 125 aa, Artificial Sequence; identical to SEQ ID NO: 1664
  Synthetic

SEQ ID NO: 1971 - protein, 109 aa, Artificial Sequence; identical to SEQ ID NO: 887
  Synthetic

SEQ ID NO: 1972 - protein, 125 aa, Artificial Sequence; identical to SEQ ID NO: 1664
  Synthetic

SEQ ID NO: 1973 - protein, 109 aa, Artificial Sequence; identical to SEQ ID NO: 889
  Synthetic

SEQ ID NO: 1974 - protein, 125 aa, Artificial Sequence; identical to SEQ ID NO: 1664
  Synthetic

SEQ ID NO: 1975 - protein, 109 aa, Artificial Sequence; identical to SEQ ID NO: 745
  Synthetic

SEQ ID NO: 1976 - protein, 5 aa, Artificial Sequence
  Synthetic
KYAMN

SEQ ID NO: 1977 - protein, 19 aa, Artificial Sequence
  Synthetic
RIRSKYNNYATYYADSVKD

SEQ ID NO: 1978 - protein, 14 aa, Artificial Sequence
  Synthetic
HGNFGNSYISYWAY

SEQ ID NO: 1979 - protein, 14 aa, Artificial Sequence
  Synthetic
GSSTGAVTSGNYPN

SEQ ID NO: 1980 - protein, 7 aa, Artificial Sequence
  Synthetic
GTKFLAP

SEQ ID NO: 1981 - protein, 9 aa, Artificial Sequence
  Synthetic
ALWYSNRWV

SEQ ID NO: 1982 - protein, 125 aa, Artificial Sequence; identical to SEQ ID NO: 1664
  Synthetic

SEQ ID NO: 1983 - protein, 109 aa, Artificial Sequence; identical to SEQ ID NO: 899
  Synthetic

SEQ ID NO: 1984 - protein, 5 aa, Artificial Sequence
  Synthetic
KYAMN

SEQ ID NO: 1985 - protein, 19 aa, Artificial Sequence
  Synthetic
RIRSKYNNYATYYADSVKD

SEQ ID NO: 1986 - protein, 14 aa, Artificial Sequence
  Synthetic
HGNFGNSYISYWAY

SEQ ID NO: 1987 - protein, 14 aa, Artificial Sequence
  Synthetic
GSSTGAVTSGNYPN

SEQ ID NO: 1988 - protein, 7 aa, Artificial Sequence
  Synthetic
GTKFLAP

SEQ ID NO: 1989 - protein, 9 aa, Artificial Sequence
  Synthetic
LLWYSNRWV

SEQ ID NO: 1990 - protein, 125 aa, Artificial Sequence; identical to SEQ ID NO: 1664
  Synthetic

SEQ ID NO: 1991 - protein, 109 aa, Artificial Sequence; identical to SEQ ID NO: 907
  Synthetic

SEQ ID NO: 1992 - protein, 125 aa, Artificial Sequence; identical to SEQ ID NO: 1664
  Synthetic

SEQ ID NO: 1993 - protein, 109 aa, Artificial Sequence; identical to SEQ ID NO: 837
  Synthetic

SEQ ID NO: 1994 - protein, 125 aa, Artificial Sequence; identical to SEQ ID NO: 1664
  Synthetic

SEQ ID NO: 1995 - protein, 109 aa, Artificial Sequence; identical to SEQ ID NO: 839
  Synthetic

SEQ ID NO: 1996 - protein, 125 aa, Artificial Sequence; identical to SEQ ID NO: 1664
  Synthetic

SEQ ID NO: 1997 - protein, 109 aa, Artificial Sequence; identical to SEQ ID NO: 913
  Synthetic

SEQ ID NO: 1998 - protein, 5 aa, Artificial Sequence
  Synthetic
KYAMN

SEQ ID NO: 1999 - protein, 19 aa, Artificial Sequence
  Synthetic
RIRSKYNNYATYYADSVKD

SEQ ID NO: 2000 - protein, 14 aa, Artificial Sequence
  Synthetic
HGNFGNSYISYWAY

SEQ ID NO: 2001 - protein, 14 aa, Artificial Sequence
  Synthetic
GSSTGAVTSGNYPN

SEQ ID NO: 2002 - protein, 7 aa, Artificial Sequence
  Synthetic
GTKFLAP

SEQ ID NO: 2003 - protein, 9 aa, Artificial Sequence
  Synthetic
VLYYSNRWV

SEQ ID NO: 2004 - protein, 125 aa, Artificial Sequence; identical to SEQ ID NO: 1664
  Synthetic

SEQ ID NO: 2005 - protein, 109 aa, Artificial Sequence; identical to SEQ ID NO: 921
  Synthetic

SEQ ID NO: 2006 - protein, 5 aa, Artificial Sequence
  Synthetic
KYAIN

SEQ ID NO: 2007 - protein, 19 aa, Artificial Sequence
  Synthetic
RIRSKYNNYATYYADAVKD

SEQ ID NO: 2008 - protein, 14 aa, Artificial Sequence
  Synthetic
AGNFGSSYISYWAY

SEQ ID NO: 2009 - protein, 14 aa, Artificial Sequence
  Synthetic
GSSTGAVTSGNYPN

SEQ ID NO: 2010 - protein, 7 aa, Artificial Sequence
  Synthetic
GTKFLAP

SEQ ID NO: 2011 - protein, 9 aa, Artificial Sequence
  Synthetic
VLWYSNRWV

SEQ ID NO: 2012 - protein, 125 aa, Artificial Sequence; identical to SEQ ID NO: 1780
  Synthetic

SEQ ID NO: 2013 - protein, 109 aa, Artificial Sequence; identical to SEQ ID NO: 91
  Synthetic

SEQ ID NO: 2014 - protein, 5 aa, Artificial Sequence
  Synthetic
KYAMN

SEQ ID NO: 2015 - protein, 19 aa, Artificial Sequence
  Synthetic
RIRSKYNNYATYYAEAVKG

SEQ ID NO: 2016 - protein, 14 aa, Artificial Sequence
  Synthetic
NENIGTSYISYWAY

SEQ ID NO: 2017 - protein, 14 aa, Artificial Sequence
  Synthetic
GSSTGAVTSGNYPN

SEQ ID NO: 2018 - protein, 7 aa, Artificial Sequence
  Synthetic
GTKFLAP

SEQ ID NO: 2019 - protein, 9 aa, Artificial Sequence
  Synthetic
VLWYSNRWV

SEQ ID NO: 2020 - protein, 125 aa, Artificial Sequence; identical to SEQ ID NO: 140
  Synthetic

SEQ ID NO: 2021 - protein, 109 aa, Artificial Sequence; identical to SEQ ID NO: 101
  Synthetic

SEQ ID NO: 2022 - protein, 5 aa, Artificial Sequence
  Synthetic
KYAMN

SEQ ID NO: 2023 - protein, 19 aa, Artificial Sequence
  Synthetic
RIRSKYNNYATYYADAVKD

SEQ ID NO: 2024 - protein, 14 aa, Artificial Sequence
  Synthetic
AGNFGSSYISYFAY

SEQ ID NO: 2025 - protein, 14 aa, Artificial Sequence
  Synthetic
GSSTGAVTSGNYPN

SEQ ID NO: 2026 - protein, 7 aa, Artificial Sequence
  Synthetic
GTKFLAP

SEQ ID NO: 2027 - protein, 9 aa, Artificial Sequence
  Synthetic
VLYYSNRWV

SEQ ID NO: 2028 - protein, 125 aa, Artificial Sequence; identical to SEQ ID NO: 1796
  Synthetic

SEQ ID NO: 2029 - protein, 109 aa, Artificial Sequence; identical to SEQ ID NO: 863
  Synthetic

SEQ ID NO: 2030 - protein, 5 aa, Artificial Sequence
  Synthetic
KYAMN

SEQ ID NO: 2031 - protein, 19 aa, Artificial Sequence
  Synthetic
RIRSKYNNYATYYADAVKD

SEQ ID NO: 2032 - protein, 14 aa, Artificial Sequence
  Synthetic
AGNFGTSYISYWAY

SEQ ID NO: 2033 - protein, 14 aa, Artificial Sequence
  Synthetic
GSSTGAVTSGNYPN

SEQ ID NO: 2034 - protein, 7 aa, Artificial Sequence
  Synthetic
GTKFLAP

SEQ ID NO: 2035 - protein, 9 aa, Artificial Sequence
  Synthetic
VLWYSNRWV

SEQ ID NO: 2036 - protein, 125 aa, Artificial Sequence; identical to SEQ ID NO: 1804
  Synthetic

SEQ ID NO: 2037 - protein, 109 aa, Artificial Sequence; identical to SEQ ID NO: 91
  Synthetic

SEQ ID NO: 2038 - protein, 5 aa, Artificial Sequence
  Synthetic
KYAIN

SEQ ID NO: 2039 - protein, 19 aa, Artificial Sequence
  Synthetic
RIRSKYNNYATYYADAVKD

SEQ ID NO: 2040 - protein, 14 aa, Artificial Sequence
  Synthetic
NANFGTSYISYFAY

SEQ ID NO: 2041 - protein, 14 aa, Artificial Sequence
  Synthetic
GSSTGAVTSGNYPN

SEQ ID NO: 2042 - protein, 7 aa, Artificial Sequence
  Synthetic
GTKFLAP

SEQ ID NO: 2043 - protein, 9 aa, Artificial Sequence
  Synthetic
VLWYSNRWV

SEQ ID NO: 2044 - protein, 125 aa, Artificial Sequence; identical to SEQ ID NO: 164
  Synthetic

SEQ ID NO: 2045 - protein, 109 aa, Artificial Sequence; identical to SEQ ID NO: 747
  Synthetic

SEQ ID NO: 2046 - protein, 5 aa, Artificial Sequence
  Synthetic
KYAMN

SEQ ID NO: 2047 - protein, 19 aa, Artificial Sequence
  Synthetic
RIRSKYNNYATYYADSVKD

SEQ ID NO: 2048 - protein, 14 aa, Artificial Sequence
  Synthetic
  misc_feature (9)..(9): Xaa is Leucine or Isoleucine
  misc_feature (11)..(11): Xaa can be any naturally occurring amino acid
HGNFGNSYXSXWAY

SEQ ID NO: 2049 - protein, 14 aa, Artificial Sequence
  Synthetic
GSSTGAVTSGYYPN

SEQ ID NO: 2050 - protein, 7 aa, Artificial Sequence
  Synthetic
GTKFLAP

SEQ ID NO: 2051 - protein, 9 aa, Artificial Sequence
  Synthetic
ALWYSNRWV

SEQ ID NO: 2052 - protein, 125 aa, Artificial Sequence
  Synthetic
  misc_feature (109)..(109): Xaa is Leucine or Isoleucine
  misc_feature (111)..(111): Xaa can be any naturally occurring amino acid
EVQLVESGGGLVQPGGSLKLSCAASGFTFNKYAMNWVRQAPGKGLEWVARIRSKYNNYATYYADSVKDRFTISRDDSKNTAYLQMNNLKTEDTAVYYCVRHGNFGNSYXSXWAYWGQGTLVTVSS

SEQ ID NO: 2053 - protein, 109 aa, Artificial Sequence; identical to SEQ ID NO: 363
  Synthetic

SEQ ID NO: 2054 - protein, 5 aa, Artificial Sequence
  Synthetic
KYAMN

SEQ ID NO: 2055 - protein, 19 aa, Artificial Sequence
  Synthetic
  misc_feature (19)..(19): Xaa can be any naturally occurring amino acid
RIRSKYNNYATYYADSVKX

SEQ ID NO: 2056 - protein, 14 aa, Artificial Sequence
  Synthetic
  misc_feature (9)..(9): Xaa is Leucine or Isoleucine
HGNFGNSYXSYWAY

SEQ ID NO: 2057 - protein, 14 aa, Artificial Sequence
  Synthetic
GSSTGAVTSGYYPN

SEQ ID NO: 2058 - protein, 7 aa, Artificial Sequence
  Synthetic
GTKFLAP

SEQ ID NO: 2059 - protein, 9 aa, Artificial Sequence
  Synthetic
ALWYSNRWV

SEQ ID NO: 2060 - protein, 125 aa, Artificial Sequence
  Synthetic
  misc_feature (68)..(68): Xaa can be any naturally occurring amino acid
  misc_feature (109)..(109): Xaa is Leucine or Isoleucine
EVQLVESGGGLVQPGGSLKLSCAASGFTFNKYAMNWVRQAPGKGLEWVARIRSKYNNYATYYADSVKXRFTISRDDSKNTAYLQMNNLKTEDTAVYYCVRHGNFGNSYXSYWAYWGQGTLVTVSS

SEQ ID NO: 2061 - protein, 109 aa, Artificial Sequence; identical to SEQ ID NO: 363
  Synthetic

SEQ ID NO: 2062 - protein, 5 aa, Artificial Sequence
  Synthetic
KYAMN

SEQ ID NO: 2063 - protein, 19 aa, Artificial Sequence
  Synthetic
  misc_feature (19)..(19): Xaa can be any naturally occurring amino acid
RIRSKYNNYATYYADSVKX

SEQ ID NO: 2064 - protein, 14 aa, Artificial Sequence
  Synthetic
HGNFGNSYISYWAY

SEQ ID NO: 2065 - protein, 14 aa, Artificial Sequence
  Synthetic
GSSTGAVTSGYYPN

SEQ ID NO: 2066 - protein, 7 aa, Artificial Sequence
  Synthetic
GTKFLAP

SEQ ID NO: 2067 - protein, 9 aa, Artificial Sequence
  Synthetic
ALWYSNRWV

SEQ ID NO: 2068 - protein, 125 aa, Artificial Sequence
  Synthetic
  misc_feature (68)..(68): Xaa can be any naturally occurring amino acid
EVQLVESGGGLVQPGGSLKLSCAASGFTFNKYAMNWVRQAPGKGLEWVARIRSKYNNYATYYADSVKXRFTISRDDSKNTAYLQMNNLKTEDTAVYYCVRHGNFGNSYISYWAYWGQGTLVTVSS

SEQ ID NO: 2069 - protein, 109 aa, Artificial Sequence; identical to SEQ ID NO: 363
  Synthetic

SEQ ID NO: 2070 - protein, 125 aa, Artificial Sequence; identical to SEQ ID NO: 1664
  Synthetic

SEQ ID NO: 2071 - protein, 109 aa, Artificial Sequence; identical to SEQ ID NO: 731
  Synthetic

SEQ ID NO: 2072 - protein, 5 aa, Artificial Sequence
  Synthetic
NHIIH

SEQ ID NO: 2073 - protein, 17 aa, Artificial Sequence
  Synthetic
YINPYPGYHAYNEKFQG

SEQ ID NO: 2074 - protein, 12 aa, Artificial Sequence
  Synthetic
DGYYRDTDVLDY

SEQ ID NO: 2075 - protein, 11 aa, Artificial Sequence
  Synthetic
QASQDISNYLN

SEQ ID NO: 2076 - protein, 7 aa, Artificial Sequence
  Synthetic
YTSRLHT

SEQ ID NO: 2077 - protein, 9 aa, Artificial Sequence
  Synthetic
QQGNTLPWT

SEQ ID NO: 2078 - protein, 121 aa, Artificial Sequence
  Synthetic
QVQLVQSGAEVKKPGASVKVSCKASGYTFTNHIIHWVRQAPGQGLEWMGYINPYPGYHAYNEKFQGRATMTSDTSTSTVYMELSSLRSEDTAVYYCARDGYYRDTDVLDYWGQGTLVTVSS

SEQ ID NO: 2079 - protein, 107 aa, Artificial Sequence
  Synthetic
DIQMTQSPSSLSASVGDRVTITCQASQDISNYLNWYQQKPGKAPKLLIYYTSRLHTGVPSRFSGSGSGTDFTFTISSLEPEDIATYYCQQGNTLPWTFGQGTKVEIK

SEQ ID NO: 2080 - protein, 121 aa, Artificial Sequence
  Synthetic
QVQLVQSGAEVKKPGASVKVSCKASGYTFTNHIIHWVRQAPGQCLEWMGYINPYPGYHAYNEKFQGRATMTSDTSTSTVYMELSSLRSEDTAVYYCARDGYYRDTDVLDYWGQGTLVTVSS

SEQ ID NO: 2081 - protein, 107 aa, Artificial Sequence
  Synthetic
DIQMTQSPSSLSASVGDRVTITCQASQDISNYLNWYQQKPGKAPKLLIYYTSRLHTGVPSRFSGSGSGTDFTFTISSLEPEDIATYYCQQGNTLPWTFGCGTKVEIK

SEQ ID NO: 2082 - protein, 107 aa, Artificial Sequence
  Synthetic
EIQMTQSPSSLSASVGDRVTITCQASQDISNYLNWYQQKPGKAPKLLIYYTSRLHTGVPSRFSGSGSGTDFTFTISSLEPEDIATYYCQQGNTLPWTFGCGTKVEIK

SEQ ID NO: 2083 - protein, 107 aa, Artificial Sequence
  Synthetic
EIQMTQSPSSLSASVGDRVTITCQASQDISNYLNWYQQKPGKAPKLLIYYTSRLHTGVPSRFSGSGSGTDFTFTISSLEPEDIATYYCQQGNTLPWTFGQGTKVEIK

SEQ ID NO: 2084 - protein, 498 aa, Artificial Sequence
  Synthetic
QVQLVQSGAEVKKPGASVKVSCKASGYTFTNHIIHWVRQAPGQGLEWMGYINPYPGYHAYNEKFQGRATMTSDTSTSTVYMELSSLRSEDTAVYYCARDGYYRDTDVLDYWGQGTLVTVSSGGGGSGGGGSGGGGSDIQMTQSPSSLSASVGDRVTITCQASQDISNYLNWYQQKPGKAPKLLIYYTSRLHTGVPSRFSGSGSGTDFTFTISSLEPEDIATYYCQQGNTLPWTFGQGTKVEIKSGGGGSEVQLVESGGGLVQPGGSLKLSCAASGFTFNKYAMNWVRQAPGKGLEWVARIRSKYNNYATYYADSVKDRFTISRDDSKNTAYLQMNNLKTEDTAVYYCVRHGNFGNSYISYWAYWGQGTLVTVSSGGGGSGGGGSGGGGSQTVVTQEPSLTVSPGGTVTLTCGSSTGAVTSGNYPNWVQQKPGQAPRGLIGGTKFLAPGTPARFSGSLLGGKAALTLSGVQPEDEAEYYCVLWYSNRWVFGGGTKLTVL

SEQ ID NO: 2085 - protein, 498 aa, Artificial Sequence
  Synthetic
QVQLVQSGAEVKKPGASVKVSCKASGYTFTNHIIHWVRQAPGQGLEWMGYINPYPGYHAYNEKFQGRATMTSDTSTSTVYMELSSLRSEDTAVYYCARDGYYRDTDVLDYWGQGTLVTVSSGGGGSGGGGSGGGGSDIQMTQSPSSLSASVGDRVTITCQASQDISNYLNWYQQKPGKAPKLLIYYTSRLHTGVPSRFSGSGSGTDFTFTISSLEPEDIATYYCQQGNTLPWTFGQGTKVEIKSGGGGSEVQLVESGGGLVQPGGSLKLSCAASGFTFNKYAINWVRQAPGKGLEWVARIRSKYNNYATYYADAVKDRFTISRDDSKNTVYLQMNNLKTEDTAVYYCARAGNFGSSYISYWAYWGQGTLVTVSSGGGGSGGGGSGGGGSQTVVTQEPSLTVSPGGTVTITCGSSTGAVTSGNYPNWVQKKPGQAPRGLIGGTKFLAPGTPARFSGSLSGGKAALTLSGVQPEDEAEYYCVLWYSNRWVFGSGTKLTVL

SEQ ID NO: 2086 - protein, 498 aa, Artificial Sequence
  Synthetic
QVQLVQSGAEVKKPGASVKVSCKASGYTFTNHIIHWVRQAPGQGLEWMGYINPYPGYHAYNEKFQGRATMTSDTSTSTVYMELSSLRSEDTAVYYCARDGYYRDTDVLDYWGQGTLVTVSSGGGGSGGGGSGGGGSDIQMTQSPSSLSASVGDRVTITCQASQDISNYLNWYQQKPGKAPKLLIYYTSRLHTGVPSRFSGSGSGTDFTFTISSLEPEDIATYYCQQGNTLPWTFGQGTKVEIKSGGGGSEVQLVESGGGLVQPGGSLKLSCAASGFTFNKYAMNWVRQAPGKGLEWVARIRSKYNNYATYYAEAVKGRFTISRDDSKNTVYLQMNNLKTEDTAVYYCVRNENIGTSYISYWAYWGQGTLVTVSSGGGGSGGGGSGGGGSQTVVTQEPSLTVSPGGTVTITCGSSTGAVTSGNYPNWVQQKPGQAPRGLIGGTKFLAPGTPARFSGSLSGGKAALTLSGVQPEDEAEYYCVLWYSNRWVFGSGTKLTVL

SEQ ID NO: 2087 - protein, 498 aa, Artificial Sequence
  Synthetic
QVQLVQSGAEVKKPGASVKVSCKASGYTFTNHIIHWVRQAPGQGLEWMGYINPYPGYHAYNEKFQGRATMTSDTSTSTVYMELSSLRSEDTAVYYCARDGYYRDTDVLDYWGQGTLVTVSSGGGGSGGGGSGGGGSDIQMTQSPSSLSASVGDRVTITCQASQDISNYLNWYQQKPGKAPKLLIYYTSRLHTGVPSRFSGSGSGTDFTFTISSLEPEDIATYYCQQGNTLPWTFGQGTKVEIKSGGGGSEVQLVESGGGLVQPGGSLKLSCAASGFTFNKYAMNWVRQAPGKGMEWVARIRSKYNNYATYYADAVKDRFTISRDDSKNTLYLQMNNLKTEDTAVYYCVRAGNFGSSYISYFAYWGQGTLVTVSSGGGGSGGGGSGGGGSQTVVTQEPSLTVSPGGTVTITCGSSTGAVTSGNYPNWIQKKPGQAPRGLIGGTKFLAPGTPARFSGSLEGGKAALTLSGVQPEDEAEYYCVLYYSNRWVFGSGTKLTVL

SEQ ID NO: 2088 - protein, 498 aa, Artificial Sequence
  Synthetic
QVQLVQSGAEVKKPGASVKVSCKASGYTFTNHIIHWVRQAPGQGLEWMGYINPYPGYHAYNEKFQGRATMTSDTSTSTVYMELSSLRSEDTAVYYCARDGYYRDTDVLDYWGQGTLVTVSSGGGGSGGGGSGGGGSDIQMTQSPSSLSASVGDRVTITCQASQDISNYLNWYQQKPGKAPKLLIYYTSRLHTGVPSRFSGSGSGTDFTFTISSLEPEDIATYYCQQGNTLPWTFGQGTKVEIKSGGGGSEVQLVESGGGLVQPGGSLKLSCAASGFTFNKYAMNWVRQAPGKGMEWVARIRSKYNNYATYYADAVKDRFTISRDDSKNTLYLQMNNLKTEDTAVYYCVRAGNFGTSYISYWAYWGQGTLVTVSSGGGGSGGGGSGGGGSQTVVTQEPSLTVSPGGTVTITCGSSTGAVTSGNYPNWVQKKPGQAPRGLIGGTKFLAPGTPARFSGSLSGGKAALTLSGVQPEDEAEYYCVLWYSNRWVFGSGTKLTVL

SEQ ID NO: 2089 - protein, 498 aa, Artificial Sequence
  Synthetic
QVQLVQSGAEVKKPGASVKVSCKASGYTFTNHIIHWVRQAPGQGLEWMGYINPYPGYHAYNEKFQGRATMTSDTSTSTVYMELSSLRSEDTAVYYCARDGYYRDTDVLDYWGQGTLVTVSSGGGGSGGGGSGGGGSDIQMTQSPSSLSASVGDRVTITCQASQDISNYLNWYQQKPGKAPKLLIYYTSRLHTGVPSRFSGSGSGTDFTFTISSLEPEDIATYYCQQGNTLPWTFGQGTKVEIKSGGGGSEVQLVESGGGLVQPGGSLKLSCAASGFTFNKYAINWVREAPGKGLEWVARIRSKYNNYATYYADAVKDRFTISRDDSKNTAYLQMNNLKTEDTAVYYCVRNANFGTSYISYFAYWGQGTLVTVSSGGGGSGGGGSGGGGSQTVVTQEPSLTVSPGGTVTLTCGSSTGAVTSGNYPNWVQKKPGQAPRGLIGGTKFLAPGTPARFSGSLLGGKAALTLSGVQPEDEAEYYCVLWYSNRWVFGSGTKLTVL

SEQ ID NO: 2090 - protein, 986 aa, Artificial Sequence
  Synthetic
QVQLVQSGAEVKKPGASVKVSCKASGYTFTNHIIHWVRQAPGQCLEWMGYINPYPGYHAYNEKFQGRATMTSDTSTSTVYMELSSLRSEDTAVYYCARDGYYRDTDVLDYWGQGTLVTVSSGGGGSGGGGSGGGGSDIQMTQSPSSLSASVGDRVTITCQASQDISNYLNWYQQKPGKAPKLLIYYTSRLHTGVPSRFSGSGSGTDFTFTISSLEPEDIATYYCQQGNTLPWTFGCGTKVEIKSGGGGSEVQLVESGGGLVQPGGSLKLSCAASGFTFNKYAMNWVRQAPGKGLEWVARIRSKYNNYATYYADSVKDRFTISRDDSKNTAYLQMNNLKTEDTAVYYCVRHGNFGNSYISYWAYWGQGTLVTVSSGGGGSGGGGSGGGGSQTVVTQEPSLTVSPGGTVTLTCGSSTGAVTSGNYPNWVQQKPGQAPRGLIGGTKFLAPGTPARFSGSLLGGKAALTLSGVQPEDEAEYYCVLWYSNRWVFGGGTKLTVLGGGGDKTHTCPPCPAPELLGGPSVFLFPPKPKDTLMISRTPEVTCVVVDVSHEDPEVKFNWYVDGVEVHNAKTKPCEEQYGSTYRCVSVLTVLHQDWLNGKEYKCKVSNKALPAPIEKTISKAKGQPREPQVYTLPPSREEMTKNQVSLTCLVKGFYPSDIAVEWESNGQPENNYKTTPPVLDSDGSFFLYSKLTVDKSRWQQGNVFSCSVMHEALHNHYTQKSLSLSPGKGGGGSGGGGSGGGGSGGGGSGGGGSGGGGSDKTHTCPPCPAPELLGGPSVFLFPPKPKDTLMISRTPEVTCVVVDVSHEDPEVKFNWYVDGVEVHNAKTKPCEEQYGSTYRCVSVLTVLHQDWLNGKEYKCKVSNKALPAPIEKTISKAKGQPREPQVYTLPPSREEMTKNQVSLTCLVKGFYPSDIAVEWESNGQPENNYKTTPPVLDSDGSFFLYSKLTVDKSRWQQGNVFSCSVMHEALHNHYTQKSLSLSPGK

SEQ ID NO: 2091 - protein, 986 aa, Artificial Sequence
  Synthetic
QVQLVQSGAEVKKPGASVKVSCKASGYTFTNHIIHWVRQAPGQCLEWMGYINPYPGYHAYNEKFQGRATMTSDTSTSTVYMELSSLRSEDTAVYYCARDGYYRDTDVLDYWGQGTLVTVSSGGGGSGGGGSGGGGSDIQMTQSPSSLSASVGDRVTITCQASQDISNYLNWYQQKPGKAPKLLIYYTSRLHTGVPSRFSGSGSGTDFTFTISSLEPEDIATYYCQQGNTLPWTFGCGTKVEIKSGGGGSEVQLVESGGGLVQPGGSLKLSCAASGFTFNKYAINWVRQAPGKGLEWVARIRSKYNNYATYYADAVKDRFTISRDDSKNTVYLQMNNLKTEDTAVYYCARAGNFGSSYISYWAYWGQGTLVTVSSGGGGSGGGGSGGGGSQTVVTQEPSLTVSPGGTVTITCGSSTGAVTSGNYPNWVQKKPGQAPRGLIGGTKFLAPGTPARFSGSLSGGKAALTLSGVQPEDEAEYYCVLWYSNRWVFGSGTKLTVLGGGGDKTHTCPPCPAPELLGGPSVFLFPPKPKDTLMISRTPEVTCVVVDVSHEDPEVKFNWYVDGVEVHNAKTKPCEEQYGSTYRCVSVLTVLHQDWLNGKEYKCKVSNKALPAPIEKTISKAKGQPREPQVYTLPPSREEMTKNQVSLTCLVKGFYPSDIAVEWESNGQPENNYKTTPPVLDSDGSFFLYSKLTVDKSRWQQGNVFSCSVMHEALHNHYTQKSLSLSPGKGGGGSGGGGSGGGGSGGGGSGGGGSGGGGSDKTHTCPPCPAPELLGGPSVFLFPPKPKDTLMISRTPEVTCVVVDVSHEDPEVKFNWYVDGVEVHNAKTKPCEEQYGSTYRCVSVLTVLHQDWLNGKEYKCKVSNKALPAPIEKTISKAKGQPREPQVYTLPPSREEMTKNQVSLTCLVKGFYPSDIAVEWESNGQPENNYKTTPPVLDSDGSFFLYSKLTVDKSRWQQGNVFSCSVMHEALHNHYTQKSLSLSPGK

SEQ ID NO: 2092 - protein, 986 aa, Artificial Sequence
  Synthetic
QVQLVQSGAEVKKPGASVKVSCKASGYTFTNHIIHWVRQAPGQCLEWMGYINPYPGYHAYNEKFQGRATMTSDTSTSTVYMELSSLRSEDTAVYYCARDGYYRDTDVLDYWGQGTLVTVSSGGGGSGGGGSGGGGSDIQMTQSPSSLSASVGDRVTITCQASQDISNYLNWYQQKPGKAPKLLIYYTSRLHTGVPSRFSGSGSGTDFTFTISSLEPEDIATYYCQQGNTLPWTFGCGTKVEIKSGGGGSEVQLVESGGGLVQPGGSLKLSCAASGFTFNKYAMNWVRQAPGKGLEWVARIRSKYNNYATYYAEAVKGRFTISRDDSKNTVYLQMNNLKTEDTAVYYCVRNENIGTSYISYWAYWGQGTLVTVSSGGGGSGGGGSGGGGSQTVVTQEPSLTVSPGGTVTITCGSSTGAVTSGNYPNWVQQKPGQAPRGLIGGTKFLAPGTPARFSGSLSGGKAALTLSGVQPEDEAEYYCVLWYSNRWVFGSGTKLTVLGGGGDKTHTCPPCPAPELLGGPSVFLFPPKPKDTLMISRTPEVTCVVVDVSHEDPEVKFNWYVDGVEVHNAKTKPCEEQYGSTYRCVSVLTVLHQDWLNGKEYKCKVSNKALPAPIEKTISKAKGQPREPQVYTLPPSREEMTKNQVSLTCLVKGFYPSDIAVEWESNGQPENNYKTTPPVLDSDGSFFLYSKLTVDKSRWQQGNVFSCSVMHEALHNHYTQKSLSLSPGKGGGGSGGGGSGGGGSGGGGSGGGGSGGGGSDKTHTCPPCPAPELLGGPSVFLFPPKPKDTLMISRTPEVTCVVVDVSHEDPEVKFNWYVDGVEVHNAKTKPCEEQYGSTYRCVSVLTVLHQDWLNGKEYKCKVSNKALPAPIEKTISKAKGQPREPQVYTLPPSREEMTKNQVSLTCLVKGFYPSDIAVEWESNGQPENNYKTTPPVLDSDGSFFLYSKLTVDKSRWQQGNVFSCSVMHEALHNHYTQKSLSLSPGK

SEQ ID NO: 2093 - protein, 986 aa, Artificial Sequence
  Synthetic
QVQLVQSGAEVKKPGASVKVSCKASGYTFTNHIIHWVRQAPGQCLEWMGYINPYPGYHAYNEKFQGRATMTSDTSTSTVYMELSSLRSEDTAVYYCARDGYYRDTDVLDYWGQGTLVTVSSGGGGSGGGGSGGGGSDIQMTQSPSSLSASVGDRVTITCQASQDISNYLNWYQQKPGKAPKLLIYYTSRLHTGVPSRFSGSGSGTDFTFTISSLEPEDIATYYCQQGNTLPWTFGCGTKVEIKSGGGGSEVQLVESGGGLVQPGGSLKLSCAASGFTFNKYAMNWVRQAPGKGMEWVARIRSKYNNYATYYADAVKDRFTISRDDSKNTLYLQMNNLKTEDTAVYYCVRAGNFGSSYISYFAYWGQGTLVTVSSGGGGSGGGGSGGGGSQTVVTQEPSLTVSPGGTVTITCGSSTGAVTSGNYPNWIQKKPGQAPRGLIGGTKFLAPGTPARFSGSLEGGKAALTLSGVQPEDEAEYYCVLYYSNRWVFGSGTKLTVLGGGGDKTHTCPPCPAPELLGGPSVFLFPPKPKDTLMISRTPEVTCVVVDVSHEDPEVKFNWYVDGVEVHNAKTKPCEEQYGSTYRCVSVLTVLHQDWLNGKEYKCKVSNKALPAPIEKTISKAKGQPREPQVYTLPPSREEMTKNQVSLTCLVKGFYPSDIAVEWESNGQPENNYKTTPPVLDSDGSFFLYSKLTVDKSRWQQGNVFSCSVMHEALHNHYTQKSLSLSPGKGGGGSGGGGSGGGGSGGGGSGGGGSGGGGSDKTHTCPPCPAPELLGGPSVFLFPPKPKDTLMISRTPEVTCVVVDVSHEDPEVKFNWYVDGVEVHNAKTKPCEEQYGSTYRCVSVLTVLHQDWLNGKEYKCKVSNKALPAPIEKTISKAKGQPREPQVYTLPPSREEMTKNQVSLTCLVKGFYPSDIAVEWESNGQPENNYKTTPPVLDSDGSFFLYSKLTVDKSRWQQGNVFSCSVMHEALHNHYTQKSLSLSPGK

SEQ ID NO: 2094 - protein, 986 aa, Artificial Sequence
  Synthetic
QVQLVQSGAEVKKPGASVKVSCKASGYTFTNHIIHWVRQAPGQCLEWMGYINPYPGYHAYNEKFQGRATMTSDTSTSTVYMELSSLRSEDTAVYYCARDGYYRDTDVLDYWGQGTLVTVSSGGGGSGGGGSGGGGSDIQMTQSPSSLSASVGDRVTITCQASQDISNYLNWYQQKPGKAPKLLIYYTSRLHTGVPSRFSGSGSGTDFTFTISSLEPEDIATYYCQQGNTLPWTFGCGTKVEIKSGGGGSEVQLVESGGGLVQPGGSLKLSCAASGFTFNKYAMNWVRQAPGKGMEWVARIRSKYNNYATYYADAVKDRFTISRDDSKNTLYLQMNNLKTEDTAVYYCVRAGNFGTSYISYWAYWGQGTLVTVSSGGGGSGGGGSGGGGSQTVVTQEPSLTVSPGGTVTITCGSSTGAVTSGNYPNWVQKKPGQAPRGLIGGTKFLAPGTPARFSGSLSGGKAALTLSGVQPEDEAEYYCVLWYSNRWVFGSGTKLTVLGGGGDKTHTCPPCPAPELLGGPSVFLFPPKPKDTLMISRTPEVTCVVVDVSHEDPEVKFNWYVDGVEVHNAKTKPCEEQYGSTYRCVSVLTVLHQDWLNGKEYKCKVSNKALPAPIEKTISKAKGQPREPQVYTLPPSREEMTKNQVSLTCLVKGFYPSDIAVEWESNGQPENNYKTTPPVLDSDGSFFLYSKLTVDKSRWQQGNVFSCSVMHEALHNHYTQKSLSLSPGKGGGGSGGGGSGGGGSGGGGSGGGGSGGGGSDKTHTCPPCPAPELLGGPSVFLFPPKPKDTLMISRTPEVTCVVVDVSHEDPEVKFNWYVDGVEVHNAKTKPCEEQYGSTYRCVSVLTVLHQDWLNGKEYKCKVSNKALPAPIEKTISKAKGQPREPQVYTLPPSREEMTKNQVSLTCLVKGFYPSDIAVEWESNGQPENNYKTTPPVLDSDGSFFLYSKLTVDKSRWQQGNVFSCSVMHEALHNHYTQKSLSLSPGK

SEQ ID NO: 2095 - protein, 986 aa, Artificial Sequence
  Synthetic
QVQLVQSGAEVKKPGASVKVSCKASGYTFTNHIIHWVRQAPGQCLEWMGYINPYPGYHAYNEKFQGRATMTSDTSTSTVYMELSSLRSEDTAVYYCARDGYYRDTDVLDYWGQGTLVTVSSGGGGSGGGGSGGGGSDIQMTQSPSSLSASVGDRVTITCQASQDISNYLNWYQQKPGKAPKLLIYYTSRLHTGVPSRFSGSGSGTDFTFTISSLEPEDIATYYCQQGNTLPWTFGCGTKVEIKSGGGGSEVQLVESGGGLVQPGGSLKLSCAASGFTFNKYAINWVREAPGKGLEWVARIRSKYNNYATYYADAVKDRFTISRDDSKNTAYLQMNNLKTEDTAVYYCVRNANFGTSYISYFAYWGQGTLVTVSSGGGGSGGGGSGGGGSQTVVTQEPSLTVSPGGTVTLTCGSSTGAVTSGNYPNWVQKKPGQAPRGLIGGTKFLAPGTPARFSGSLLGGKAALTLSGVQPEDEAEYYCVLWYSNRWVFGSGTKLTVLGGGGDKTHTCPPCPAPELLGGPSVFLFPPKPKDTLMISRTPEVTCVVVDVSHEDPEVKFNWYVDGVEVHNAKTKPCEEQYGSTYRCVSVLTVLHQDWLNGKEYKCKVSNKALPAPIEKTISKAKGQPREPQVYTLPPSREEMTKNQVSLTCLVKGFYPSDIAVEWESNGQPENNYKTTPPVLDSDGSFFLYSKLTVDKSRWQQGNVFSCSVMHEALHNHYTQKSLSLSPGKGGGGSGGGGSGGGGSGGGGSGGGGSGGGGSDKTHTCPPCPAPELLGGPSVFLFPPKPKDTLMISRTPEVTCVVVDVSHEDPEVKFNWYVDGVEVHNAKTKPCEEQYGSTYRCVSVLTVLHQDWLNGKEYKCKVSNKALPAPIEKTISKAKGQPREPQVYTLPPSREEMTKNQVSLTCLVKGFYPSDIAVEWESNGQPENNYKTTPPVLDSDGSFFLYSKLTVDKSRWQQGNVFSCSVMHEALHNHYTQKSLSLSPGK

SEQ ID NO: 2096 - protein, 5 aa, Artificial Sequence
  Synthetic
HYAMS

SEQ ID NO: 2097 - protein, 17 aa, Artificial Sequence
  Synthetic
AVSGGGDKTLYADAVKG

SEQ ID NO: 2098 - protein, 10 aa, Artificial Sequence
  Synthetic
LRGFYYGMDV

SEQ ID NO: 2099 - protein, 16 aa, Artificial Sequence
  Synthetic
RSSQSLLHSNKYNYLD

SEQ ID NO: 2100 - protein, 7 aa, Artificial Sequence
  Synthetic
LGSNRAS

SEQ ID NO: 2101 - protein, 10 aa, Artificial Sequence
  Synthetic
MQALQTPPIT

SEQ ID NO: 2102 - protein, 119 aa, Artificial Sequence
  Synthetic
EVQLLESGGGLVQPGGSLRLSCAASGFTFSHYAMSWVRQAPGKCLEWVSAVSGGGDKTLYADAVKGRFTISRDNSKNTLFLQMNSLRAEDTAIYYCARLRGFYYGMDVWGQGTTVTVSS

SEQ ID NO: 2103 - protein, 113 aa, Artificial Sequence
  Synthetic
DIVLTQSPLSLPVTPGEPASISCRSSQSLLHSNKYNYLDWYLQKPGQSPQLLIYLGSNRASGVPDRFSGSGSGTDFTLKISRVEAEDVGVYYCMQALQTPPITFGCGTRLEIK

SEQ ID NO: 2104 - protein, 113 aa, Artificial Sequence
  Synthetic
EIVLTQSPLSLPVTPGEPASISCRSSQSLLHSNKYNYLDWYLQKPGQSPQLLIYLGSNRASGVPDRFSGSGSGTDFTLKISRVEAEDVGVYYCMQALQTPPITFGCGTRLEIK

SEQ ID NO: 2105 - protein, 990 aa, Artificial Sequence
  Synthetic
EVQLLESGGGLVQPGGSLRLSCAASGFTFSHYAMSWVRQAPGKCLEWVSAVSGGGDKTLYADAVKGRFTISRDNSKNTLFLQMNSLRAEDTAIYYCARLRGFYYGMDVWGQGTTVTVSSGGGGSGGGGSGGGGSDIVLTQSPLSLPVTPGEPASISCRSSQSLLHSNKYNYLDWYLQKPGQSPQLLIYLGSNRASGVPDRFSGSGSGTDFTLKISRVEAEDVGVYYCMQALQTPPITFGCGTRLEIKSGGGGSEVQLVESGGGLVQPGGSLKLSCAASGFTFNKYAMNWVRQAPGKGLEWVARIRSKYNNYATYYADSVKDRFTISRDDSKNTAYLQMNNLKTEDTAVYYCVRHGNFGNSYISYWAYWGQGTLVTVSSGGGGSGGGGSGGGGSQTVVTQEPSLTVSPGGTVTLTCGSSTGAVTSGNYPNWVQQKPGQAPRGLIGGTKFLAPGTPARFSGSLLGGKAALTLSGVQPEDEAEYYCVLWYSNRWVFGGGTKLTVLGGGGDKTHTCPPCPAPELLGGPSVFLFPPKPKDTLMISRTPEVTCVVVDVSHEDPEVKFNWYVDGVEVHNAKTKPCEEQYGSTYRCVSVLTVLHQDWLNGKEYKCKVSNKALPAPIEKTISKAKGQPREPQVYTLPPSREEMTKNQVSLTCLVKGFYPSDIAVEWESNGQPENNYKTTPPVLDSDGSFFLYSKLTVDKSRWQQGNVFSCSVMHEALHNHYTQKSLSLSPGKGGGGSGGGGSGGGGSGGGGSGGGGSGGGGSDKTHTCPPCPAPELLGGPSVFLFPPKPKDTLMISRTPEVTCVVVDVSHEDPEVKFNWYVDGVEVHNAKTKPCEEQYGSTYRCVSVLTVLHQDWLNGKEYKCKVSNKALPAPIEKTISKAKGQPREPQVYTLPPSREEMTKNQVSLTCLVKGFYPSDIAVEWESNGQPENNYKTTPPVLDSDGSFFLYSKLTVDKSRWQQGNVFSCSVMHEALHNHYTQKSLSLSPGK

SEQ ID NO: 2106 - protein, 990 aa, Artificial Sequence
  Synthetic
EVQLLESGGGLVQPGGSLRLSCAASGFTFSHYAMSWVRQAPGKCLEWVSAVSGGGDKTLYADAVKGRFTISRDNSKNTLFLQMNSLRAEDTAIYYCARLRGFYYGMDVWGQGTTVTVSSGGGGSGGGGSGGGGSDIVLTQSPLSLPVTPGEPASISCRSSQSLLHSNKYNYLDWYLQKPGQSPQLLIYLGSNRASGVPDRFSGSGSGTDFTLKISRVEAEDVGVYYCMQALQTPPITFGCGTRLEIKSGGGGSEVQLVESGGGLVQPGGSLKLSCAASGFTFNKYAINWVRQAPGKGLEWVARIRSKYNNYATYYADAVKDRFTISRDDSKNTVYLQMNNLKTEDTAVYYCARAGNFGSSYISYWAYWGQGTLVTVSSGGGGSGGGGSGGGGSQTVVTQEPSLTVSPGGTVTITCGSSTGAVTSGNYPNWVQKKPGQAPRGLIGGTKFLAPGTPARFSGSLSGGKAALTLSGVQPEDEAEYYCVLWYSNRWVFGSGTKLTVLGGGGDKTHTCPPCPAPELLGGPSVFLFPPKPKDTLMISRTPEVTCVVVDVSHEDPEVKFNWYVDGVEVHNAKTKPCEEQYGSTYRCVSVLTVLHQDWLNGKEYKCKVSNKALPAPIEKTISKAKGQPREPQVYTLPPSREEMTKNQVSLTCLVKGFYPSDIAVEWESNGQPENNYKTTPPVLDSDGSFFLYSKLTVDKSRWQQGNVFSCSVMHEALHNHYTQKSLSLSPGKGGGGSGGGGSGGGGSGGGGSGGGGSGGGGSDKTHTCPPCPAPELLGGPSVFLFPPKPKDTLMISRTPEVTCVVVDVSHEDPEVKFNWYVDGVEVHNAKTKPCEEQYGSTYRCVSVLTVLHQDWLNGKEYKCKVSNKALPAPIEKTISKAKGQPREPQVYTLPPSREEMTKNQVSLTCLVKGFYPSDIAVEWESNGQPENNYKTTPPVLDSDGSFFLYSKLTVDKSRWQQGNVFSCSVMHEALHNHYTQKSLSLSPGK

SEQ ID NO: 2107 - protein, 990 aa, Artificial Sequence
  Synthetic
EVQLLESGGGLVQPGGSLRLSCAASGFTFSHYAMSWVRQAPGKCLEWVSAVSGGGDKTLYADAVKGRFTISRDNSKNTLFLQMNSLRAEDTAIYYCARLRGFYYGMDVWGQGTTVTVSSGGGGSGGGGSGGGGSDIVLTQSPLSLPVTPGEPASISCRSSQSLLHSNKYNYLDWYLQKPGQSPQLLIYLGSNRASGVPDRFSGSGSGTDFTLKISRVEAEDVGVYYCMQALQTPPITFGCGTRLEIKSGGGGSEVQLVESGGGLVQPGGSLKLSCAASGFTFNKYAMNWVRQAPGKGLEWVARIRSKYNNYATYYAEAVKGRFTISRDDSKNTVYLQMNNLKTEDTAVYYCVRNENIGTSYISYWAYWGQGTLVTVSSGGGGSGGGGSGGGGSQTVVTQEPSLTVSPGGTVTITCGSSTGAVTSGNYPNWVQQKPGQAPRGLIGGTKFLAPGTPARFSGSLSGGKAALTLSGVQPEDEAEYYCVLWYSNRWVFGSGTKLTVLGGGGDKTHTCPPCPAPELLGGPSVFLFPPKPKDTLMISRTPEVTCVVVDVSHEDPEVKFNWYVDGVEVHNAKTKPCEEQYGSTYRCVSVLTVLHQDWLNGKEYKCKVSNKALPAPIEKTISKAKGQPREPQVYTLPPSREEMTKNQVSLTCLVKGFYPSDIAVEWESNGQPENNYKTTPPVLDSDGSFFLYSKLTVDKSRWQQGNVFSCSVMHEALHNHYTQKSLSLSPGKGGGGSGGGGSGGGGSGGGGSGGGGSGGGGSDKTHTCPPCPAPELLGGPSVFLFPPKPKDTLMISRTPEVTCVVVDVSHEDPEVKFNWYVDGVEVHNAKTKPCEEQYGSTYRCVSVLTVLHQDWLNGKEYKCKVSNKALPAPIEKTISKAKGQPREPQVYTLPPSREEMTKNQVSLTCLVKGFYPSDIAVEWESNGQPENNYKTTPPVLDSDGSFFLYSKLTVDKSRWQQGNVFSCSVMHEALHNHYTQKSLSLSPGK

SEQ ID NO: 2108 - protein, 990 aa, Artificial Sequence
  Synthetic
EVQLLESGGGLVQPGGSLRLSCAASGFTFSHYAMSWVRQAPGKCLEWVSAVSGGGDKTLYADAVKGRFTISRDNSKNTLFLQMNSLRAEDTAIYYCARLRGFYYGMDVWGQGTTVTVSSGGGGSGGGGSGGGGSDIVLTQSPLSLPVTPGEPASISCRSSQSLLHSNKYNYLDWYLQKPGQSPQLLIYLGSNRASGVPDRFSGSGSGTDFTLKISRVEAEDVGVYYCMQALQTPPITFGCGTRLEIKSGGGGSEVQLVESGGGLVQPGGSLKLSCAASGFTFNKYAMNWVRQAPGKGMEWVARIRSKYNNYATYYADAVKDRFTISRDDSKNTLYLQMNNLKTEDTAVYYCVRAGNFGSSYISYFAYWGQGTLVTVSSGGGGSGGGGSGGGGSQTVVTQEPSLTVSPGGTVTITCGSSTGAVTSGNYPNWIQKKPGQAPRGLIGGTKFLAPGTPARFSGSLEGGKAALTLSGVQPEDEAEYYCVLYYSNRWVFGSGTKLTVLGGGGDKTHTCPPCPAPELLGGPSVFLFPPKPKDTLMISRTPEVTCVVVDVSHEDPEVKFNWYVDGVEVHNAKTKPCEEQYGSTYRCVSVLTVLHQDWLNGKEYKCKVSNKALPAPIEKTISKAKGQPREPQVYTLPPSREEMTKNQVSLTCLVKGFYPSDIAVEWESNGQPENNYKTTPPVLDSDGSFFLYSKLTVDKSRWQQGNVFSCSVMHEALHNHYTQKSLSLSPGKGGGGSGGGGSGGGGSGGGGSGGGGSGGGGSDKTHTCPPCPAPELLGGPSVFLFPPKPKDTLMISRTPEVTCVVVDVSHEDPEVKFNWYVDGVEVHNAKTKPCEEQYGSTYRCVSVLTVLHQDWLNGKEYKCKVSNKALPAPIEKTISKAKGQPREPQVYTLPPSREEMTKNQVSLTCLVKGFYPSDIAVEWESNGQPENNYKTTPPVLDSDGSFFLYSKLTVDKSRWQQGNVFSCSVMHEALHNHYTQKSLSLSPGK

SEQ ID NO: 2109 - protein, 990 aa, Artificial Sequence
  Synthetic
EVQLLESGGGLVQPGGSLRLSCAASGFTFSHYAMSWVRQAPGKCLEWVSAVSGGGDKTLYADAVKGRFTISRDNSKNTLFLQMNSLRAEDTAIYYCARLRGFYYGMDVWGQGTTVTVSSGGGGSGGGGSGGGGSDIVLTQSPLSLPVTPGEPASISCRSSQSLLHSNKYNYLDWYLQKPGQSPQLLIYLGSNRASGVPDRFSGSGSGTDFTLKISRVEAEDVGVYYCMQALQTPPITFGCGTRLEIKSGGGGSEVQLVESGGGLVQPGGSLKLSCAASGFTFNKYAMNWVRQAPGKGMEWVARIRSKYNNYATYYADAVKDRFTISRDDSKNTLYLQMNNLKTEDTAVYYCVRAGNFGTSYISYWAYWGQGTLVTVSSGGGGSGGGGSGGGGSQTVVTQEPSLTVSPGGTVTITCGSSTGAVTSGNYPNWVQKKPGQAPRGLIGGTKFLAPGTPARFSGSLSGGKAALTLSGVQPEDEAEYYCVLWYSNRWVFGSGTKLTVLGGGGDKTHTCPPCPAPELLGGPSVFLFPPKPKDTLMISRTPEVTCVVVDVSHEDPEVKFNWYVDGVEVHNAKTKPCEEQYGSTYRCVSVLTVLHQDWLNGKEYKCKVSNKALPAPIEKTISKAKGQPREPQVYTLPPSREEMTKNQVSLTCLVKGFYPSDIAVEWESNGQPENNYKTTPPVLDSDGSFFLYSKLTVDKSRWQQGNVFSCSVMHEALHNHYTQKSLSLSPGKGGGGSGGGGSGGGGSGGGGSGGGGSGGGGSDKTHTCPPCPAPELLGGPSVFLFPPKPKDTLMISRTPEVTCVVVDVSHEDPEVKFNWYVDGVEVHNAKTKPCEEQYGSTYRCVSVLTVLHQDWLNGKEYKCKVSNKALPAPIEKTISKAKGQPREPQVYTLPPSREEMTKNQVSLTCLVKGFYPSDIAVEWESNGQPENNYKTTPPVLDSDGSFFLYSKLTVDKSRWQQGNVFSCSVMHEALHNHYTQKSLSLSPGK

SEQ ID NO: 2110 - protein, 990 aa, Artificial Sequence
  Synthetic
EVQLLESGGGLVQPGGSLRLSCAASGFTFSHYAMSWVRQAPGKCLEWVSAVSGGGDKTLYADAVKGRFTISRDNSKNTLFLQMNSLRAEDTAIYYCARLRGFYYGMDVWGQGTTVTVSSGGGGSGGGGSGGGGSDIVLTQSPLSLPVTPGEPASISCRSSQSLLHSNKYNYLDWYLQKPGQSPQLLIYLGSNRASGVPDRFSGSGSGTDFTLKISRVEAEDVGVYYCMQALQTPPITFGCGTRLEIKSGGGGSEVQLVESGGGLVQPGGSLKLSCAASGFTFNKYAINWVREAPGKGLEWVARIRSKYNNYATYYADAVKDRFTISRDDSKNTAYLQMNNLKTEDTAVYYCVRNANFGTSYISYFAYWGQGTLVTVSSGGGGSGGGGSGGGGSQTVVTQEPSLTVSPGGTVTLTCGSSTGAVTSGNYPNWVQKKPGQAPRGLIGGTKFLAPGTPARFSGSLLGGKAALTLSGVQPEDEAEYYCVLWYSNRWVFGSGTKLTVLGGGGDKTHTCPPCPAPELLGGPSVFLFPPKPKDTLMISRTPEVTCVVVDVSHEDPEVKFNWYVDGVEVHNAKTKPCEEQYGSTYRCVSVLTVLHQDWLNGKEYKCKVSNKALPAPIEKTISKAKGQPREPQVYTLPPSREEMTKNQVSLTCLVKGFYPSDIAVEWESNGQPENNYKTTPPVLDSDGSFFLYSKLTVDKSRWQQGNVFSCSVMHEALHNHYTQKSLSLSPGKGGGGSGGGGSGGGGSGGGGSGGGGSGGGGSDKTHTCPPCPAPELLGGPSVFLFPPKPKDTLMISRTPEVTCVVVDVSHEDPEVKFNWYVDGVEVHNAKTKPCEEQYGSTYRCVSVLTVLHQDWLNGKEYKCKVSNKALPAPIEKTISKAKGQPREPQVYTLPPSREEMTKNQVSLTCLVKGFYPSDIAVEWESNGQPENNYKTTPPVLDSDGSFFLYSKLTVDKSRWQQGNVFSCSVMHEALHNHYTQKSLSLSPGK

SEQ ID NO: 2111 - protein, 5 aa, Artificial Sequence
  Synthetic
SYGMH

SEQ ID NO: 2112 - protein, 17 aa, Artificial Sequence
  Synthetic
VISYEGSNKYYAESVKG

SEQ ID NO: 2113 - protein, 13 aa, Artificial Sequence
  Synthetic
DRGTIFGNYGLEV

SEQ ID NO: 2114 - protein, 16 aa, Artificial Sequence
  Synthetic
RSSQSLLHKNAFNYLD

SEQ ID NO: 2115 - protein, 7 aa, Artificial Sequence
  Synthetic
LGSNRAS

SEQ ID NO: 2116 - protein, 9 aa, Artificial Sequence
  Synthetic
MQALQTPFT

SEQ ID NO: 2117 - protein, 122 aa, Artificial Sequence
  Synthetic
QVQLVESGGGVVQPGRSLRLSCAASGFTFSSYGMHWVRQAPGKCLEWVAVISYEGSNKYYAESVKGRFTISRDNSKNTLYLQMNSLRDEDTAVYYCARDRGTIFGNYGLEVWGQGTTVTVSS

SEQ ID NO: 2118 - protein, 112 aa, Artificial Sequence
  Synthetic
DIVMTQSPLSLPVISGEPASISCRSSQSLLHKNAFNYLDWYLQKPGQSPQLLIYLGSNRASGVPDRFSGSGSGTDFTLKISRVEAEDVGVYYCMQALQTPFTFGCGTKVDIK

SEQ ID NO: 2119 - protein, 112 aa, Artificial Sequence
  Synthetic
EIVMTQSPLSLPVISGEPASISCRSSQSLLHKNAFNYLDWYLQKPGQSPQLLIYLGSNRASGVPDRFSGSGSGTDFTLKISRVEAEDVGVYYCMQALQTPFTFGCGTKVDIK

SEQ ID NO: 2120 - protein, 992 aa, Artificial Sequence
  Synthetic
DIVMTQSPLSLPVISGEPASISCRSSQSLLHKNAFNYLDWYLQKPGQSPQLLIYLGSNRASGVPDRFSGSGSGTDFTLKISRVEAEDVGVYYCMQALQTPFTFGCGTKVDIKGGGGSGGGGSGGGGSQVQLVESGGGVVQPGRSLRLSCAASGFTFSSYGMHWVRQAPGKCLEWVAVISYEGSNKYYAESVKGRFTISRDNSKNTLYLQMNSLRDEDTAVYYCARDRGTIFGNYGLEVWGQGTTVTVSSSGGGGSEVQLVESGGGLVQPGGSLKLSCAASGFTFNKYAMNWVRQAPGKGLEWVARIRSKYNNYATYYADSVKDRFTISRDDSKNTAYLQMNNLKTEDTAVYYCVRHGNFGNSYISYWAYWGQGTLVTVSSGGGGSGGGGSGGGGSQTVVTQEPSLTVSPGGTVTLTCGSSTGAVTSGNYPNWVQQKPGQAPRGLIGGTKFLAPGTPARFSGSLLGGKAALTLSGVQPEDEAEYYCVLWYSNRWVFGGGTKLTVLGGGGDKTHTCPPCPAPELLGGPSVFLFPPKPKDTLMISRTPEVTCVVVDVSHEDPEVKFNWYVDGVEVHNAKTKPCEEQYGSTYRCVSVLTVLHQDWLNGKEYKCKVSNKALPAPIEKTISKAKGQPREPQVYTLPPSREEMTKNQVSLTCLVKGFYPSDIAVEWESNGQPENNYKTTPPVLDSDGSFFLYSKLTVDKSRWQQGNVFSCSVMHEALHNHYTQKSLSLSPGKGGGGSGGGGSGGGGSGGGGSGGGGSGGGGSDKTHTCPPCPAPELLGGPSVFLFPPKPKDTLMISRTPEVTCVVVDVSHEDPEVKFNWYVDGVEVHNAKTKPCEEQYGSTYRCVSVLTVLHQDWLNGKEYKCKVSNKALPAPIEKTISKAKGQPREPQVYTLPPSREEMTKNQVSLTCLVKGFYPSDIAVEWESNGQPENNYKTTPPVLDSDGSFFLYSKLTVDKSRWQQGNVFSCSVMHEALHNHYTQKSLSLSPGK

SEQ ID NO: 2121 - protein, 992 aa, Artificial Sequence
  Synthetic
DIVMTQSPLSLPVISGEPASISCRSSQSLLHKNAFNYLDWYLQKPGQSPQLLIYLGSNRASGVPDRFSGSGSGTDFTLKISRVEAEDVGVYYCMQALQTPFTFGCGTKVDIKGGGGSGGGGSGGGGSQVQLVESGGGVVQPGRSLRLSCAASGFTFSSYGMHWVRQAPGKCLEWVAVISYEGSNKYYAESVKGRFTISRDNSKNTLYLQMNSLRDEDTAVYYCARDRGTIFGNYGLEVWGQGTTVTVSSSGGGGSEVQLVESGGGLVQPGGSLKLSCAASGFTFNKYAINWVRQAPGKGLEWVARIRSKYNNYATYYADAVKDRFTISRDDSKNTVYLQMNNLKTEDTAVYYCARAGNFGSSYISYWAYWGQGTLVTVSSGGGGSGGGGSGGGGSQTVVTQEPSLTVSPGGTVTITCGSSTGAVTSGNYPNWVQKKPGQAPRGLIGGTKFLAPGTPARFSGSLSGGKAALTLSGVQPEDEAEYYCVLWYSNRWVFGSGTKLTVLGGGGDKTHTCPPCPAPELLGGPSVFLFPPKPKDTLMISRTPEVTCVVVDVSHEDPEVKFNWYVDGVEVHNAKTKPCEEQYGSTYRCVSVLTVLHQDWLNGKEYKCKVSNKALPAPIEKTISKAKGQPREPQVYTLPPSREEMTKNQVSLTCLVKGFYPSDIAVEWESNGQPENNYKTTPPVLDSDGSFFLYSKLTVDKSRWQQGNVFSCSVMHEALHNHYTQKSLSLSPGKGGGGSGGGGSGGGGSGGGGSGGGGSGGGGSDKTHTCPPCPAPELLGGPSVFLFPPKPKDTLMISRTPEVTCVVVDVSHEDPEVKFNWYVDGVEVHNAKTKPCEEQYGSTYRCVSVLTVLHQDWLNGKEYKCKVSNKALPAPIEKTISKAKGQPREPQVYTLPPSREEMTKNQVSLTCLVKGFYPSDIAVEWESNGQPENNYKTTPPVLDSDGSFFLYSKLTVDKSRWQQGNVFSCSVMHEALHNHYTQKSLSLSPGK

SEQ ID NO: 2122 - protein, 992 aa, Artificial Sequence
  Synthetic
DIVMTQSPLSLPVISGEPASISCRSSQSLLHKNAFNYLDWYLQKPGQSPQLLIYLGSNRASGVPDRFSGSGSGTDFTLKISRVEAEDVGVYYCMQALQTPFTFGCGTKVDIKGGGGSGGGGSGGGGSQVQLVESGGGVVQPGRSLRLSCAASGFTFSSYGMHWVRQAPGKCLEWVAVISYEGSNKYYAESVKGRFTISRDNSKNTLYLQMNSLRDEDTAVYYCARDRGTIFGNYGLEVWGQGTTVTVSSSGGGGSEVQLVESGGGLVQPGGSLKLSCAASGFTFNKYAMNWVRQAPGKGLEWVARIRSKYNNYATYYAEAVKGRFTISRDDSKNTVYLQMNNLKTEDTAVYYCVRNENIGTSYISYWAYWGQGTLVTVSSGGGGSGGGGSGGGGSQTVVTQEPSLTVSPGGTVTITCGSSTGAVTSGNYPNWVQQKPGQAPRGLIGGTKFLAPGTPARFSGSLSGGKAALTLSGVQPEDEAEYYCVLWYSNRWVFGSGTKLTVLGGGGDKTHTCPPCPAPELLGGPSVFLFPPKPKDTLMISRTPEVTCVVVDVSHEDPEVKFNWYVDGVEVHNAKTKPCEEQYGSTYRCVSVLTVLHQDWLNGKEYKCKVSNKALPAPIEKTISKAKGQPREPQVYTLPPSREEMTKNQVSLTCLVKGFYPSDIAVEWESNGQPENNYKTTPPVLDSDGSFFLYSKLTVDKSRWQQGNVFSCSVMHEALHNHYTQKSLSLSPGKGGGGSGGGGSGGGGSGGGGSGGGGSGGGGSDKTHTCPPCPAPELLGGPSVFLFPPKPKDTLMISRTPEVTCVVVDVSHEDPEVKFNWYVDGVEVHNAKTKPCEEQYGSTYRCVSVLTVLHQDWLNGKEYKCKVSNKALPAPIEKTISKAKGQPREPQVYTLPPSREEMTKNQVSLTCLVKGFYPSDIAVEWESNGQPENNYKTTPPVLDSDGSFFLYSKLTVDKSRWQQGNVFSCSVMHEALHNHYTQKSLSLSPGK

SEQ ID NO: 2123 - protein, 992 aa, Artificial Sequence
  Synthetic
DIVMTQSPLSLPVISGEPASISCRSSQSLLHKNAFNYLDWYLQKPGQSPQLLIYLGSNRASGVPDRFSGSGSGTDFTLKISRVEAEDVGVYYCMQALQTPFTFGCGTKVDIKGGGGSGGGGSGGGGSQVQLVESGGGVVQPGRSLRLSCAASGFTFSSYGMHWVRQAPGKCLEWVAVISYEGSNKYYAESVKGRFTISRDNSKNTLYLQMNSLRDEDTAVYYCARDRGTIFGNYGLEVWGQGTTVTVSSSGGGGSEVQLVESGGGLVQPGGSLKLSCAASGFTFNKYAMNWVRQAPGKGMEWVARIRSKYNNYATYYADAVKDRFTISRDDSKNTLYLQMNNLKTEDTAVYYCVRAGNFGSSYISYFAYWGQGTLVTVSSGGGGSGGGGSGGGGSQTVVTQEPSLTVSPGGTVTITCGSSTGAVTSGNYPNWIQKKPGQAPRGLIGGTKFLAPGTPARFSGSLEGGKAALTLSGVQPEDEAEYYCVLYYSNRWVFGSGTKLTVLGGGGDKTHTCPPCPAPELLGGPSVFLFPPKPKDTLMISRTPEVTCVVVDVSHEDPEVKFNWYVDGVEVHNAKTKPCEEQYGSTYRCVSVLTVLHQDWLNGKEYKCKVSNKALPAPIEKTISKAKGQPREPQVYTLPPSREEMTKNQVSLTCLVKGFYPSDIAVEWESNGQPENNYKTTPPVLDSDGSFFLYSKLTVDKSRWQQGNVFSCSVMHEALHNHYTQKSLSLSPGKGGGGSGGGGSGGGGSGGGGSGGGGSGGGGSDKTHTCPPCPAPELLGGPSVFLFPPKPKDTLMISRTPEVTCVVVDVSHEDPEVKFNWYVDGVEVHNAKTKPCEEQYGSTYRCVSVLTVLHQDWLNGKEYKCKVSNKALPAPIEKTISKAKGQPREPQVYTLPPSREEMTKNQVSLTCLVKGFYPSDIAVEWESNGQPENNYKTTPPVLDSDGSFFLYSKLTVDKSRWQQGNVFSCSVMHEALHNHYTQKSLSLSPGK

SEQ ID NO: 2124 - protein, 992 aa, Artificial Sequence
  Synthetic
DIVMTQSPLSLPVISGEPASISCRSSQSLLHKNAFNYLDWYLQKPGQSPQLLIYLGSNRASGVPDRFSGSGSGTDFTLKISRVEAEDVGVYYCMQALQTPFTFGCGTKVDIKGGGGSGGGGSGGGGSQVQLVESGGGVVQPGRSLRLSCAASGFTFSSYGMHWVRQAPGKCLEWVAVISYEGSNKYYAESVKGRFTISRDNSKNTLYLQMNSLRDEDTAVYYCARDRGTIFGNYGLEVWGQGTTVTVSSSGGGGSEVQLVESGGGLVQPGGSLKLSCAASGFTFNKYAMNWVRQAPGKGMEWVARIRSKYNNYATYYADAVKDRFTISRDDSKNTLYLQMNNLKTEDTAVYYCVRAGNFGTSYISYWAYWGQGTLVTVSSGGGGSGGGGSGGGGSQTVVTQEPSLTVSPGGTVTITCGSSTGAVTSGNYPNWVQKKPGQAPRGLIGGTKFLAPGTPARFSGSLSGGKAALTLSGVQPEDEAEYYCVLWYSNRWVFGSGTKLTVLGGGGDKTHTCPPCPAPELLGGPSVFLFPPKPKDTLMISRTPEVTCVVVDVSHEDPEVKFNWYVDGVEVHNAKTKPCEEQYGSTYRCVSVLTVLHQDWLNGKEYKCKVSNKALPAPIEKTISKAKGQPREPQVYTLPPSREEMTKNQVSLTCLVKGFYPSDIAVEWESNGQPENNYKTTPPVLDSDGSFFLYSKLTVDKSRWQQGNVFSCSVMHEALHNHYTQKSLSLSPGKGGGGSGGGGSGGGGSGGGGSGGGGSGGGGSDKTHTCPPCPAPELLGGPSVFLFPPKPKDTLMISRTPEVTCVVVDVSHEDPEVKFNWYVDGVEVHNAKTKPCEEQYGSTYRCVSVLTVLHQDWLNGKEYKCKVSNKALPAPIEKTISKAKGQPREPQVYTLPPSREEMTKNQVSLTCLVKGFYPSDIAVEWESNGQPENNYKTTPPVLDSDGSFFLYSKLTVDKSRWQQGNVFSCSVMHEALHNHYTQKSLSLSPGK

SEQ ID NO: 2125 - protein, 992 aa, Artificial Sequence
  Synthetic
DIVMTQSPLSLPVISGEPASISCRSSQSLLHKNAFNYLDWYLQKPGQSPQLLIYLGSNRASGVPDRFSGSGSGTDFTLKISRVEAEDVGVYYCMQALQTPFTFGCGTKVDIKGGGGSGGGGSGGGGSQVQLVESGGGVVQPGRSLRLSCAASGFTFSSYGMHWVRQAPGKCLEWVAVISYEGSNKYYAESVKGRFTISRDNSKNTLYLQMNSLRDEDTAVYYCARDRGTIFGNYGLEVWGQGTTVTVSSSGGGGSEVQLVESGGGLVQPGGSLKLSCAASGFTFNKYAINWVREAPGKGLEWVARIRSKYNNYATYYADAVKDRFTISRDDSKNTAYLQMNNLKTEDTAVYYCVRNANFGTSYISYFAYWGQGTLVTVSSGGGGSGGGGSGGGGSQTVVTQEPSLTVSPGGTVTLTCGSSTGAVTSGNYPNWVQKKPGQAPRGLIGGTKFLAPGTPARFSGSLLGGKAALTLSGVQPEDEAEYYCVLWYSNRWVFGSGTKLTVLGGGGDKTHTCPPCPAPELLGGPSVFLFPPKPKDTLMISRTPEVTCVVVDVSHEDPEVKFNWYVDGVEVHNAKTKPCEEQYGSTYRCVSVLTVLHQDWLNGKEYKCKVSNKALPAPIEKTISKAKGQPREPQVYTLPPSREEMTKNQVSLTCLVKGFYPSDIAVEWESNGQPENNYKTTPPVLDSDGSFFLYSKLTVDKSRWQQGNVFSCSVMHEALHNHYTQKSLSLSPGKGGGGSGGGGSGGGGSGGGGSGGGGSGGGGSDKTHTCPPCPAPELLGGPSVFLFPPKPKDTLMISRTPEVTCVVVDVSHEDPEVKFNWYVDGVEVHNAKTKPCEEQYGSTYRCVSVLTVLHQDWLNGKEYKCKVSNKALPAPIEKTISKAKGQPREPQVYTLPPSREEMTKNQVSLTCLVKGFYPSDIAVEWESNGQPENNYKTTPPVLDSDGSFFLYSKLTVDKSRWQQGNVFSCSVMHEALHNHYTQKSLSLSPGK

SEQ ID NO: 2126 - protein, 5 aa, Artificial Sequence
  Synthetic
SYWMH

SEQ ID NO: 2127 - protein, 17 aa, Artificial Sequence
  Synthetic
YITPSTGYTEYNQKFKG

SEQ ID NO: 2128 - protein, 10 aa, Artificial Sequence
  Synthetic
VHDYDRAMEY

SEQ ID NO: 2129 - protein, 11 aa, Artificial Sequence
  Synthetic
KASQDINKYIA

SEQ ID NO: 2130 - protein, 7 aa, Artificial Sequence
  Synthetic
YTSTLQP

SEQ ID NO: 2131 - protein, 9 aa, Artificial Sequence
  Synthetic
LQYASYPFT

SEQ ID NO: 2132 - protein, 119 aa, Artificial Sequence
  Synthetic
QVQLVQSGAEVKKPGASVKVSCKASGYTFTSYWMHWVRQAPGQCLEWIGYITPSTGYTEYNQKFKGRVTMTRDKSTSTVYMELSSLTSEDTAVYYCARVHDYDRAMEYWGQGTTVTVSS

SEQ ID NO: 2133 - protein, 107 aa, Artificial Sequence
  Synthetic
DIQMTQSPSSLSASVGDRVTITCKASQDINKYIAWYQQKPGKGPKLLIYYTSTLQPGVPSRFSGSGSGTDFTFTISSLQPEDIATYYCLQYASYPFTFGCGTRLEIK

SEQ ID NO: 2134 - protein, 107 aa, Artificial Sequence
  Synthetic
EIQMTQSPSSLSASVGDRVTITCKASQDINKYIAWYQQKPGKGPKLLIYYTSTLQPGVPSRFSGSGSGTDFTFTISSLQPEDIATYYCLQYASYPFTFGCGTRLEIK

SEQ ID NO: 2135 - protein, 984 aa, Artificial Sequence
  Synthetic
QVQLVQSGAEVKKPGASVKVSCKASGYTFTSYWMHWVRQAPGQCLEWIGYITPSTGYTEYNQKFKGRVTMTRDKSTSTVYMELSSLTSEDTAVYYCARVHDYDRAMEYWGQGTTVTVSSGGGGSGGGGSGGGGSDIQMTQSPSSLSASVGDRVTITCKASQDINKYIAWYQQKPGKGPKLLIYYTSTLQPGVPSRFSGSGSGTDFTFTISSLQPEDIATYYCLQYASYPFTFGCGTRLEIKSGGGGSEVQLVESGGGLVQPGGSLKLSCAASGFTFNKYAMNWVRQAPGKGLEWVARIRSKYNNYATYYADSVKDRFTISRDDSKNTAYLQMNNLKTEDTAVYYCVRHGNFGNSYISYWAYWGQGTLVTVSSGGGGSGGGGSGGGGSQTVVTQEPSLTVSPGGTVTLTCGSSTGAVTSGNYPNWVQQKPGQAPRGLIGGTKFLAPGTPARFSGSLLGGKAALTLSGVQPEDEAEYYCVLWYSNRWVFGGGTKLTVLGGGGDKTHTCPPCPAPELLGGPSVFLFPPKPKDTLMISRTPEVTCVVVDVSHEDPEVKFNWYVDGVEVHNAKTKPCEEQYGSTYRCVSVLTVLHQDWLNGKEYKCKVSNKALPAPIEKTISKAKGQPREPQVYTLPPSREEMTKNQVSLTCLVKGFYPSDIAVEWESNGQPENNYKTTPPVLDSDGSFFLYSKLTVDKSRWQQGNVFSCSVMHEALHNHYTQKSLSLSPGKGGGGSGGGGSGGGGSGGGGSGGGGSGGGGSDKTHTCPPCPAPELLGGPSVFLFPPKPKDTLMISRTPEVTCVVVDVSHEDPEVKFNWYVDGVEVHNAKTKPCEEQYGSTYRCVSVLTVLHQDWLNGKEYKCKVSNKALPAPIEKTISKAKGQPREPQVYTLPPSREEMTKNQVSLTCLVKGFYPSDIAVEWESNGQPENNYKTTPPVLDSDGSFFLYSKLTVDKSRWQQGNVFSCSVMHEALHNHYTQKSLSLSPGK

SEQ ID NO: 2136 - protein, 984 aa, Artificial Sequence
  Synthetic
QVQLVQSGAEVKKPGASVKVSCKASGYTFTSYWMHWVRQAPGQCLEWIGYITPSTGYTEYNQKFKGRVTMTRDKSTSTVYMELSSLTSEDTAVYYCARVHDYDRAMEYWGQGTTVTVSSGGGGSGGGGSGGGGSDIQMTQSPSSLSASVGDRVTITCKASQDINKYIAWYQQKPGKGPKLLIYYTSTLQPGVPSRFSGSGSGTDFTFTISSLQPEDIATYYCLQYASYPFTFGCGTRLEIKSGGGGSEVQLVESGGGLVQPGGSLKLSCAASGFTFNKYAINWVRQAPGKGLEWVARIRSKYNNYATYYADAVKDRFTISRDDSKNTVYLQMNNLKTEDTAVYYCARAGNFGSSYISYWAYWGQGTLVTVSSGGGGSGGGGSGGGGSQTVVTQEPSLTVSPGGTVTITCGSSTGAVTSGNYPNWVQKKPGQAPRGLIGGTKFLAPGTPARFSGSLSGGKAALTLSGVQPEDEAEYYCVLWYSNRWVFGSGTKLTVLGGGGDKTHTCPPCPAPELLGGPSVFLFPPKPKDTLMISRTPEVTCVVVDVSHEDPEVKFNWYVDGVEVHNAKTKPCEEQYGSTYRCVSVLTVLHQDWLNGKEYKCKVSNKALPAPIEKTISKAKGQPREPQVYTLPPSREEMTKNQVSLTCLVKGFYPSDIAVEWESNGQPENNYKTTPPVLDSDGSFFLYSKLTVDKSRWQQGNVFSCSVMHEALHNHYTQKSLSLSPGKGGGGSGGGGSGGGGSGGGGSGGGGSGGGGSDKTHTCPPCPAPELLGGPSVFLFPPKPKDTLMISRTPEVTCVVVDVSHEDPEVKFNWYVDGVEVHNAKTKPCEEQYGSTYRCVSVLTVLHQDWLNGKEYKCKVSNKALPAPIEKTISKAKGQPREPQVYTLPPSREEMTKNQVSLTCLVKGFYPSDIAVEWESNGQPENNYKTTPPVLDSDGSFFLYSKLTVDKSRWQQGNVFSCSVMHEALHNHYTQKSLSLSPGK

SEQ ID NO: 2137 - protein, 984 aa, Artificial Sequence
  Synthetic
QVQLVQSGAEVKKPGASVKVSCKASGYTFTSYWMHWVRQAPGQCLEWIGYITPSTGYTEYNQKFKGRVTMTRDKSTSTVYMELSSLTSEDTAVYYCARVHDYDRAMEYWGQGTTVTVSSGGGGSGGGGSGGGGSDIQMTQSPSSLSASVGDRVTITCKASQDINKYIAWYQQKPGKGPKLLIYYTSTLQPGVPSRFSGSGSGTDFTFTISSLQPEDIATYYCLQYASYPFTFGCGTRLEIKSGGGGSEVQLVESGGGLVQPGGSLKLSCAASGFTFNKYAMNWVRQAPGKGLEWVARIRSKYNNYATYYAEAVKGRFTISRDDSKNTVYLQMNNLKTEDTAVYYCVRNENIGTSYISYWAYWGQGTLVTVSSGGGGSGGGGSGGGGSQTVVTQEPSLTVSPGGTVTITCGSSTGAVTSGNYPNWVQQKPGQAPRGLIGGTKFLAPGTPARFSGSLSGGKAALTLSGVQPEDEAEYYCVLWYSNRWVFGSGTKLTVLGGGGDKTHTCPPCPAPELLGGPSVFLFPPKPKDTLMISRTPEVTCVVVDVSHEDPEVKFNWYVDGVEVHNAKTKPCEEQYGSTYRCVSVLTVLHQDWLNGKEYKCKVSNKALPAPIEKTISKAKGQPREPQVYTLPPSREEMTKNQVSLTCLVKGFYPSDIAVEWESNGQPENNYKTTPPVLDSDGSFFLYSKLTVDKSRWQQGNVFSCSVMHEALHNHYTQKSLSLSPGKGGGGSGGGGSGGGGSGGGGSGGGGSGGGGSDKTHTCPPCPAPELLGGPSVFLFPPKPKDTLMISRTPEVTCVVVDVSHEDPEVKFNWYVDGVEVHNAKTKPCEEQYGSTYRCVSVLTVLHQDWLNGKEYKCKVSNKALPAPIEKTISKAKGQPREPQVYTLPPSREEMTKNQVSLTCLVKGFYPSDIAVEWESNGQPENNYKTTPPVLDSDGSFFLYSKLTVDKSRWQQGNVFSCSVMHEALHNHYTQKSLSLSPGK

SEQ ID NO: 2138 - protein, 984 aa, Artificial Sequence
  Synthetic
QVQLVQSGAEVKKPGASVKVSCKASGYTFTSYWMHWVRQAPGQCLEWIGYITPSTGYTEYNQKFKGRVTMTRDKSTSTVYMELSSLTSEDTAVYYCARVHDYDRAMEYWGQGTTVTVSSGGGGSGGGGSGGGGSDIQMTQSPSSLSASVGDRVTITCKASQDINKYIAWYQQKPGKGPKLLIYYTSTLQPGVPSRFSGSGSGTDFTFTISSLQPEDIATYYCLQYASYPFTFGCGTRLEIKSGGGGSEVQLVESGGGLVQPGGSLKLSCAASGFTFNKYAMNWVRQAPGKGMEWVARIRSKYNNYATYYADAVKDRFTISRDDSKNTLYLQMNNLKTEDTAVYYCVRAGNFGSSYISYFAYWGQGTLVTVSSGGGGSGGGGSGGGGSQTVVTQEPSLTVSPGGTVTITCGSSTGAVTSGNYPNWIQKKPGQAPRGLIGGTKFLAPGTPARFSGSLEGGKAALTLSGVQPEDEAEYYCVLYYSNRWVFGSGTKLTVLGGGGDKTHTCPPCPAPELLGGPSVFLFPPKPKDTLMISRTPEVTCVVVDVSHEDPEVKFNWYVDGVEVHNAKTKPCEEQYGSTYRCVSVLTVLHQDWLNGKEYKCKVSNKALPAPIEKTISKAKGQPREPQVYTLPPSREEMTKNQVSLTCLVKGFYPSDIAVEWESNGQPENNYKTTPPVLDSDGSFFLYSKLTVDKSRWQQGNVFSCSVMHEALHNHYTQKSLSLSPGKGGGGSGGGGSGGGGSGGGGSGGGGSGGGGSDKTHTCPPCPAPELLGGPSVFLFPPKPKDTLMISRTPEVTCVVVDVSHEDPEVKFNWYVDGVEVHNAKTKPCEEQYGSTYRCVSVLTVLHQDWLNGKEYKCKVSNKALPAPIEKTISKAKGQPREPQVYTLPPSREEMTKNQVSLTCLVKGFYPSDIAVEWESNGQPENNYKTTPPVLDSDGSFFLYSKLTVDKSRWQQGNVFSCSVMHEALHNHYTQKSLSLSPGK

SEQ ID NO: 2139 - protein, 984 aa, Artificial Sequence
  Synthetic
QVQLVQSGAEVKKPGASVKVSCKASGYTFTSYWMHWVRQAPGQCLEWIGYITPSTGYTEYNQKFKGRVTMTRDKSTSTVYMELSSLTSEDTAVYYCARVHDYDRAMEYWGQGTTVTVSSGGGGSGGGGSGGGGSDIQMTQSPSSLSASVGDRVTITCKASQDINKYIAWYQQKPGKGPKLLIYYTSTLQPGVPSRFSGSGSGTDFTFTISSLQPEDIATYYCLQYASYPFTFGCGTRLEIKSGGGGSEVQLVESGGGLVQPGGSLKLSCAASGFTFNKYAMNWVRQAPGKGMEWVARIRSKYNNYATYYADAVKDRFTISRDDSKNTLYLQMNNLKTEDTAVYYCVRAGNFGTSYISYWAYWGQGTLVTVSSGGGGSGGGGSGGGGSQTVVTQEPSLTVSPGGTVTITCGSSTGAVTSGNYPNWVQKKPGQAPRGLIGGTKFLAPGTPARFSGSLSGGKAALTLSGVQPEDEAEYYCVLWYSNRWVFGSGTKLTVLGGGGDKTHTCPPCPAPELLGGPSVFLFPPKPKDTLMISRTPEVTCVVVDVSHEDPEVKFNWYVDGVEVHNAKTKPCEEQYGSTYRCVSVLTVLHQDWLNGKEYKCKVSNKALPAPIEKTISKAKGQPREPQVYTLPPSREEMTKNQVSLTCLVKGFYPSDIAVEWESNGQPENNYKTTPPVLDSDGSFFLYSKLTVDKSRWQQGNVFSCSVMHEALHNHYTQKSLSLSPGKGGGGSGGGGSGGGGSGGGGSGGGGSGGGGSDKTHTCPPCPAPELLGGPSVFLFPPKPKDTLMISRTPEVTCVVVDVSHEDPEVKFNWYVDGVEVHNAKTKPCEEQYGSTYRCVSVLTVLHQDWLNGKEYKCKVSNKALPAPIEKTISKAKGQPREPQVYTLPPSREEMTKNQVSLTCLVKGFYPSDIAVEWESNGQPENNYKTTPPVLDSDGSFFLYSKLTVDKSRWQQGNVFSCSVMHEALHNHYTQKSLSLSPGK

SEQ ID NO: 2140 - protein, 984 aa, Artificial Sequence
  Synthetic
QVQLVQSGAEVKKPGASVKVSCKASGYTFTSYWMHWVRQAPGQCLEWIGYITPSTGYTEYNQKFKGRVTMTRDKSTSTVYMELSSLTSEDTAVYYCARVHDYDRAMEYWGQGTTVTVSSGGGGSGGGGSGGGGSDIQMTQSPSSLSASVGDRVTITCKASQDINKYIAWYQQKPGKGPKLLIYYTSTLQPGVPSRFSGSGSGTDFTFTISSLQPEDIATYYCLQYASYPFTFGCGTRLEIKSGGGGSEVQLVESGGGLVQPGGSLKLSCAASGFTFNKYAINWVREAPGKGLEWVARIRSKYNNYATYYADAVKDRFTISRDDSKNTAYLQMNNLKTEDTAVYYCVRNANFGTSYISYFAYWGQGTLVTVSSGGGGSGGGGSGGGGSQTVVTQEPSLTVSPGGTVTLTCGSSTGAVTSGNYPNWVQKKPGQAPRGLIGGTKFLAPGTPARFSGSLLGGKAALTLSGVQPEDEAEYYCVLWYSNRWVFGSGTKLTVLGGGGDKTHTCPPCPAPELLGGPSVFLFPPKPKDTLMISRTPEVTCVVVDVSHEDPEVKFNWYVDGVEVHNAKTKPCEEQYGSTYRCVSVLTVLHQDWLNGKEYKCKVSNKALPAPIEKTISKAKGQPREPQVYTLPPSREEMTKNQVSLTCLVKGFYPSDIAVEWESNGQPENNYKTTPPVLDSDGSFFLYSKLTVDKSRWQQGNVFSCSVMHEALHNHYTQKSLSLSPGKGGGGSGGGGSGGGGSGGGGSGGGGSGGGGSDKTHTCPPCPAPELLGGPSVFLFPPKPKDTLMISRTPEVTCVVVDVSHEDPEVKFNWYVDGVEVHNAKTKPCEEQYGSTYRCVSVLTVLHQDWLNGKEYKCKVSNKALPAPIEKTISKAKGQPREPQVYTLPPSREEMTKNQVSLTCLVKGFYPSDIAVEWESNGQPENNYKTTPPVLDSDGSFFLYSKLTVDKSRWQQGNVFSCSVMHEALHNHYTQKSLSLSPGK

SEQ ID NO: 2141 - protein, 5 aa, Artificial Sequence
  Synthetic
SYGIS

SEQ ID NO: 2142 - protein, 17 aa, Artificial Sequence
  Synthetic
WISAYSGNAIYAQKLQG

SEQ ID NO: 2143 - protein, 13 aa, Artificial Sequence
  Synthetic
DPDYYGSGSYSDY

SEQ ID NO: 2144 - protein, 11 aa, Artificial Sequence
  Synthetic
RASQSVSSNLA

SEQ ID NO: 2145 - protein, 7 aa, Artificial Sequence
  Synthetic
GASSRAT

SEQ ID NO: 2146 - protein, 10 aa, Artificial Sequence
  Synthetic
QQYHSWPLLT

SEQ ID NO: 2147 - protein, 122 aa, Artificial Sequence
  Synthetic
QVQLVQSGAEVKKPGASVKVSCKASGYTFTSYGISWVRQAPGQCLEWMGWISAYSGNAIYAQKLQGRVTMTRDTSTSTAYMELRSLRSDDTAVYYCARDPDYYGSGSYSDYWGQGTLVTVSS

SEQ ID NO: 2148 - protein, 108 aa, Artificial Sequence
  Synthetic
EIVLTQSPATLSVSPGERATLSCRASQSVSSNLAWYQQKPGQAPRLLIYGASSRATGIPARFSGSGSGTEFTLTISSLQSEDFAVYYCQQYHSWPLLTFGCGTKVEIK

SEQ ID NO: 2149 - protein, 988 aa, Artificial Sequence
  Synthetic
QVQLVQSGAEVKKPGASVKVSCKASGYTFTSYGISWVRQAPGQCLEWMGWISAYSGNAIYAQKLQGRVTMTRDTSTSTAYMELRSLRSDDTAVYYCARDPDYYGSGSYSDYWGQGTLVTVSSGGGGSGGGGSGGGGSEIVLTQSPATLSVSPGERATLSCRASQSVSSNLAWYQQKPGQAPRLLIYGASSRATGIPARFSGSGSGTEFTLTISSLQSEDFAVYYCQQYHSWPLLTFGCGTKVEIKSGGGGSEVQLVESGGGLVQPGGSLKLSCAASGFTFNKYAMNWVRQAPGKGLEWVARIRSKYNNYATYYADSVKDRFTISRDDSKNTAYLQMNNLKTEDTAVYYCVRHGNFGNSYISYWAYWGQGTLVTVSSGGGGSGGGGSGGGGSQTVVTQEPSLTVSPGGTVTLTCGSSTGAVTSGNYPNWVQQKPGQAPRGLIGGTKFLAPGTPARFSGSLLGGKAALTLSGVQPEDEAEYYCVLWYSNRWVFGGGTKLTVLGGGGDKTHTCPPCPAPELLGGPSVFLFPPKPKDTLMISRTPEVTCVVVDVSHEDPEVKFNWYVDGVEVHNAKTKPCEEQYGSTYRCVSVLTVLHQDWLNGKEYKCKVSNKALPAPIEKTISKAKGQPREPQVYTLPPSREEMTKNQVSLTCLVKGFYPSDIAVEWESNGQPENNYKTTPPVLDSDGSFFLYSKLTVDKSRWQQGNVFSCSVMHEALHNHYTQKSLSLSPGKGGGGSGGGGSGGGGSGGGGSGGGGSGGGGSDKTHTCPPCPAPELLGGPSVFLFPPKPKDTLMISRTPEVTCVVVDVSHEDPEVKFNWYVDGVEVHNAKTKPCEEQYGSTYRCVSVLTVLHQDWLNGKEYKCKVSNKALPAPIEKTISKAKGQPREPQVYTLPPSREEMTKNQVSLTCLVKGFYPSDIAVEWESNGQPENNYKTTPPVLDSDGSFFLYSKLTVDKSRWQQGNVFSCSVMHEALHNHYTQKSLSLSPGK

SEQ ID NO: 2150 - protein, 988 aa, Artificial Sequence
  Synthetic
QVQLVQSGAEVKKPGASVKVSCKASGYTFTSYGISWVRQAPGQCLEWMGWISAYSGNAIYAQKLQGRVTMTRDTSTSTAYMELRSLRSDDTAVYYCARDPDYYGSGSYSDYWGQGTLVTVSSGGGGSGGGGSGGGGSEIVLTQSPATLSVSPGERATLSCRASQSVSSNLAWYQQKPGQAPRLLIYGASSRATGIPARFSGSGSGTEFTLTISSLQSEDFAVYYCQQYHSWPLLTFGCGTKVEIKSGGGGSEVQLVESGGGLVQPGGSLKLSCAASGFTFNKYAINWVRQAPGKGLEWVARIRSKYNNYATYYADAVKDRFTISRDDSKNTVYLQMNNLKTEDTAVYYCARAGNFGSSYISYWAYWGQGTLVTVSSGGGGSGGGGSGGGGSQTVVTQEPSLTVSPGGTVTITCGSSTGAVTSGNYPNWVQKKPGQAPRGLIGGTKFLAPGTPARFSGSLSGGKAALTLSGVQPEDEAEYYCVLWYSNRWVFGSGTKLTVLGGGGDKTHTCPPCPAPELLGGPSVFLFPPKPKDTLMISRTPEVTCVVVDVSHEDPEVKFNWYVDGVEVHNAKTKPCEEQYGSTYRCVSVLTVLHQDWLNGKEYKCKVSNKALPAPIEKTISKAKGQPREPQVYTLPPSREEMTKNQVSLTCLVKGFYPSDIAVEWESNGQPENNYKTTPPVLDSDGSFFLYSKLTVDKSRWQQGNVFSCSVMHEALHNHYTQKSLSLSPGKGGGGSGGGGSGGGGSGGGGSGGGGSGGGGSDKTHTCPPCPAPELLGGPSVFLFPPKPKDTLMISRTPEVTCVVVDVSHEDPEVKFNWYVDGVEVHNAKTKPCEEQYGSTYRCVSVLTVLHQDWLNGKEYKCKVSNKALPAPIEKTISKAKGQPREPQVYTLPPSREEMTKNQVSLTCLVKGFYPSDIAVEWESNGQPENNYKTTPPVLDSDGSFFLYSKLTVDKSRWQQGNVFSCSVMHEALHNHYTQKSLSLSPGK

SEQ ID NO: 2151 - protein, 988 aa, Artificial Sequence
  Synthetic
QVQLVQSGAEVKKPGASVKVSCKASGYTFTSYGISWVRQAPGQCLEWMGWISAYSGNAIYAQKLQGRVTMTRDTSTSTAYMELRSLRSDDTAVYYCARDPDYYGSGSYSDYWGQGTLVTVSSGGGGSGGGGSGGGGSEIVLTQSPATLSVSPGERATLSCRASQSVSSNLAWYQQKPGQAPRLLIYGASSRATGIPARFSGSGSGTEFTLTISSLQSEDFAVYYCQQYHSWPLLTFGCGTKVEIKSGGGGSEVQLVESGGGLVQPGGSLKLSCAASGFTFNKYAMNWVRQAPGKGLEWVARIRSKYNNYATYYAEAVKGRFTISRDDSKNTVYLQMNNLKTEDTAVYYCVRNENIGTSYISYWAYWGQGTLVTVSSGGGGSGGGGSGGGGSQTVVTQEPSLTVSPGGTVTITCGSSTGAVTSGNYPNWVQQKPGQAPRGLIGGTKFLAPGTPARFSGSLSGGKAALTLSGVQPEDEAEYYCVLWYSNRWVFGSGTKLTVLGGGGDKTHTCPPCPAPELLGGPSVFLFPPKPKDTLMISRTPEVTCVVVDVSHEDPEVKFNWYVDGVEVHNAKTKPCEEQYGSTYRCVSVLTVLHQDWLNGKEYKCKVSNKALPAPIEKTISKAKGQPREPQVYTLPPSREEMTKNQVSLTCLVKGFYPSDIAVEWESNGQPENNYKTTPPVLDSDGSFFLYSKLTVDKSRWQQGNVFSCSVMHEALHNHYTQKSLSLSPGKGGGGSGGGGSGGGGSGGGGSGGGGSGGGGSDKTHTCPPCPAPELLGGPSVFLFPPKPKDTLMISRTPEVTCVVVDVSHEDPEVKFNWYVDGVEVHNAKTKPCEEQYGSTYRCVSVLTVLHQDWLNGKEYKCKVSNKALPAPIEKTISKAKGQPREPQVYTLPPSREEMTKNQVSLTCLVKGFYPSDIAVEWESNGQPENNYKTTPPVLDSDGSFFLYSKLTVDKSRWQQGNVFSCSVMHEALHNHYTQKSLSLSPGK

SEQ ID NO: 2152 - protein, 988 aa, Artificial Sequence
  Synthetic
QVQLVQSGAEVKKPGASVKVSCKASGYTFTSYGISWVRQAPGQCLEWMGWISAYSGNAIYAQKLQGRVTMTRDTSTSTAYMELRSLRSDDTAVYYCARDPDYYGSGSYSDYWGQGTLVTVSSGGGGSGGGGSGGGGSEIVLTQSPATLSVSPGERATLSCRASQSVSSNLAWYQQKPGQAPRLLIYGASSRATGIPARFSGSGSGTEFTLTISSLQSEDFAVYYCQQYHSWPLLTFGCGTKVEIKSGGGGSEVQLVESGGGLVQPGGSLKLSCAASGFTFNKYAMNWVRQAPGKGMEWVARIRSKYNNYATYYADAVKDRFTISRDDSKNTLYLQMNNLKTEDTAVYYCVRAGNFGSSYISYFAYWGQGTLVTVSSGGGGSGGGGSGGGGSQTVVTQEPSLTVSPGGTVTITCGSSTGAVTSGNYPNWIQKKPGQAPRGLIGGTKFLAPGTPARFSGSLEGGKAALTLSGVQPEDEAEYYCVLYYSNRWVFGSGTKLTVLGGGGDKTHTCPPCPAPELLGGPSVFLFPPKPKDTLMISRTPEVTCVVVDVSHEDPEVKFNWYVDGVEVHNAKTKPCEEQYGSTYRCVSVLTVLHQDWLNGKEYKCKVSNKALPAPIEKTISKAKGQPREPQVYTLPPSREEMTKNQVSLTCLVKGFYPSDIAVEWESNGQPENNYKTTPPVLDSDGSFFLYSKLTVDKSRWQQGNVFSCSVMHEALHNHYTQKSLSLSPGKGGGGSGGGGSGGGGSGGGGSGGGGSGGGGSDKTHTCPPCPAPELLGGPSVFLFPPKPKDTLMISRTPEVTCVVVDVSHEDPEVKFNWYVDGVEVHNAKTKPCEEQYGSTYRCVSVLTVLHQDWLNGKEYKCKVSNKALPAPIEKTISKAKGQPREPQVYTLPPSREEMTKNQVSLTCLVKGFYPSDIAVEWESNGQPENNYKTTPPVLDSDGSFFLYSKLTVDKSRWQQGNVFSCSVMHEALHNHYTQKSLSLSPGK

SEQ ID NO: 2153 - protein, 988 aa, Artificial Sequence
  Synthetic
QVQLVQSGAEVKKPGASVKVSCKASGYTFTSYGISWVRQAPGQCLEWMGWISAYSGNAIYAQKLQGRVTMTRDTSTSTAYMELRSLRSDDTAVYYCARDPDYYGSGSYSDYWGQGTLVTVSSGGGGSGGGGSGGGGSEIVLTQSPATLSVSPGERATLSCRASQSVSSNLAWYQQKPGQAPRLLIYGASSRATGIPARFSGSGSGTEFTLTISSLQSEDFAVYYCQQYHSWPLLTFGCGTKVEIKSGGGGSEVQLVESGGGLVQPGGSLKLSCAASGFTFNKYAMNWVRQAPGKGMEWVARIRSKYNNYATYYADAVKDRFTISRDDSKNTLYLQMNNLKTEDTAVYYCVRAGNFGTSYISYWAYWGQGTLVTVSSGGGGSGGGGSGGGGSQTVVTQEPSLTVSPGGTVTITCGSSTGAVTSGNYPNWVQKKPGQAPRGLIGGTKFLAPGTPARFSGSLSGGKAALTLSGVQPEDEAEYYCVLWYSNRWVFGSGTKLTVLGGGGDKTHTCPPCPAPELLGGPSVFLFPPKPKDTLMISRTPEVTCVVVDVSHEDPEVKFNWYVDGVEVHNAKTKPCEEQYGSTYRCVSVLTVLHQDWLNGKEYKCKVSNKALPAPIEKTISKAKGQPREPQVYTLPPSREEMTKNQVSLTCLVKGFYPSDIAVEWESNGQPENNYKTTPPVLDSDGSFFLYSKLTVDKSRWQQGNVFSCSVMHEALHNHYTQKSLSLSPGKGGGGSGGGGSGGGGSGGGGSGGGGSGGGGSDKTHTCPPCPAPELLGGPSVFLFPPKPKDTLMISRTPEVTCVVVDVSHEDPEVKFNWYVDGVEVHNAKTKPCEEQYGSTYRCVSVLTVLHQDWLNGKEYKCKVSNKALPAPIEKTISKAKGQPREPQVYTLPPSREEMTKNQVSLTCLVKGFYPSDIAVEWESNGQPENNYKTTPPVLDSDGSFFLYSKLTVDKSRWQQGNVFSCSVMHEALHNHYTQKSLSLSPGK

SEQ ID NO: 2154 - protein, 988 aa, Artificial Sequence
  Synthetic
QVQLVQSGAEVKKPGASVKVSCKASGYTFTSYGISWVRQAPGQCLEWMGWISAYSGNAIYAQKLQGRVTMTRDTSTSTAYMELRSLRSDDTAVYYCARDPDYYGSGSYSDYWGQGTLVTVSSGGGGSGGGGSGGGGSEIVLTQSPATLSVSPGERATLSCRASQSVSSNLAWYQQKPGQAPRLLIYGASSRATGIPARFSGSGSGTEFTLTISSLQSEDFAVYYCQQYHSWPLLTFGCGTKVEIKSGGGGSEVQLVESGGGLVQPGGSLKLSCAASGFTFNKYAINWVREAPGKGLEWVARIRSKYNNYATYYADAVKDRFTISRDDSKNTAYLQMNNLKTEDTAVYYCVRNANFGTSYISYFAYWGQGTLVTVSSGGGGSGGGGSGGGGSQTVVTQEPSLTVSPGGTVTLTCGSSTGAVTSGNYPNWVQKKPGQAPRGLIGGTKFLAPGTPARFSGSLLGGKAALTLSGVQPEDEAEYYCVLWYSNRWVFGSGTKLTVLGGGGDKTHTCPPCPAPELLGGPSVFLFPPKPKDTLMISRTPEVTCVVVDVSHEDPEVKFNWYVDGVEVHNAKTKPCEEQYGSTYRCVSVLTVLHQDWLNGKEYKCKVSNKALPAPIEKTISKAKGQPREPQVYTLPPSREEMTKNQVSLTCLVKGFYPSDIAVEWESNGQPENNYKTTPPVLDSDGSFFLYSKLTVDKSRWQQGNVFSCSVMHEALHNHYTQKSLSLSPGKGGGGSGGGGSGGGGSGGGGSGGGGSGGGGSDKTHTCPPCPAPELLGGPSVFLFPPKPKDTLMISRTPEVTCVVVDVSHEDPEVKFNWYVDGVEVHNAKTKPCEEQYGSTYRCVSVLTVLHQDWLNGKEYKCKVSNKALPAPIEKTISKAKGQPREPQVYTLPPSREEMTKNQVSLTCLVKGFYPSDIAVEWESNGQPENNYKTTPPVLDSDGSFFLYSKLTVDKSRWQQGNVFSCSVMHEALHNHYTQKSLSLSPGK

SEQ ID NO: 2155 - protein, 5 aa, Artificial Sequence
  Synthetic
NYGMN

SEQ ID NO: 2156 - protein, 17 aa, Artificial Sequence
  Synthetic
WINTYTGEPTYADKFQG

SEQ ID NO: 2157 - protein, 13 aa, Artificial Sequence
  Synthetic
WSWSDGYYVYFDY

SEQ ID NO: 2158 - protein, 17 aa, Artificial Sequence
  Synthetic
KSSQSVLDSSTNKNSLA

SEQ ID NO: 2159 - protein, 7 aa, Artificial Sequence
  Synthetic
WASTRES

SEQ ID NO: 2160 - protein, 9 aa, Artificial Sequence
  Synthetic
QQSAHFPIT

SEQ ID NO: 2161 - protein, 122 aa, Artificial Sequence
  Synthetic
QVQLVQSGAEVKKPGESVKVSCKASGYTFTNYGMNWVKQAPGQGLEWMGWINTYTGEPTYADKFQGRVTMTTDTSTSTAYMEIRNLGGDDTAVYYCARWSWSDGYYVYFDYWGQGTSVTVSS

SEQ ID NO: 2162 - protein, 113 aa, Artificial Sequence
  Synthetic
DIVMTQSPDSLTVSLGERTTINCKSSQSVLDSSTNKNSLAWYQQKPGQPPKLLLSWASTRESGIPDRFSGSGSGTDFTLTIDSPQPEDSATYYCQQSAHFPITFGQGTRLEIK

SEQ ID NO: 2163 - protein, 122 aa, Artificial Sequence
  Synthetic
QVQLVQSGAEVKKPGESVKVSCKASGYTFTNYGMNWVKQAPGQCLEWMGWINTYTGEPTYADKFQGRVTMTTDTSTSTAYMEIRNLGGDDTAVYYCARWSWSDGYYVYFDYWGQGTSVTVSS

SEQ ID NO: 2164 - protein, 113 aa, Artificial Sequence
  Synthetic
DIVMTQSPDSLTVSLGERTTINCKSSQSVLDSSTNKNSLAWYQQKPGQPPKLLLSWASTRESGIPDRFSGSGSGTDFTLTIDSPQPEDSATYYCQQSAHFPITFGCGTRLEIK

SEQ ID NO: 2165 - protein, 113 aa, Artificial Sequence
  Synthetic
EIVMTQSPDSLTVSLGERTTINCKSSQSVLDSSTNKNSLAWYQQKPGQPPKLLLSWASTRESGIPDRFSGSGSGTDFTLTIDSPQPEDSATYYCQQSAHFPITFGCGTRLEIK

SEQ ID NO: 2166 - protein, 113 aa, Artificial Sequence
  Synthetic
EIVMTQSPDSLTVSLGERTTINCKSSQSVLDSSTNKNSLAWYQQKPGQPPKLLLSWASTRESGIPDRFSGSGSGTDFTLTIDSPQPEDSATYYCQQSAHFPITFGQGTRLEIK

SEQ ID NO: 2167 - protein, 505 aa, Artificial Sequence
  Synthetic
QVQLVQSGAEVKKPGESVKVSCKASGYTFTNYGMNWVKQAPGQGLEWMGWINTYTGEPTYADKFQGRVTMTTDTSTSTAYMEIRNLGGDDTAVYYCARWSWSDGYYVYFDYWGQGTSVTVSSGGGGSGGGGSGGGGSDIVMTQSPDSLTVSLGERTTINCKSSQSVLDSSTNKNSLAWYQQKPGQPPKLLLSWASTRESGIPDRFSGSGSGTDFTLTIDSPQPEDSATYYCQQSAHFPITFGQGTRLEIKSGGGGSEVQLVESGGGLVQPGGSLKLSCAASGFTFNKYAMNWVRQAPGKGLEWVARIRSKYNNYATYYADSVKDRFTISRDDSKNTAYLQMNNLKTEDTAVYYCVRHGNFGNSYISYWAYWGQGTLVTVSSGGGGSGGGGSGGGGSQTVVTQEPSLTVSPGGTVTLTCGSSTGAVTSGNYPNWVQQKPGQAPRGLIGGTKFLAPGTPARFSGSLLGGKAALTLSGVQPEDEAEYYCVLWYSNRWVFGGGTKLTVL

SEQ ID NO: 2168 - protein, 505 aa, Artificial Sequence
  Synthetic
QVQLVQSGAEVKKPGESVKVSCKASGYTFTNYGMNWVKQAPGQGLEWMGWINTYTGEPTYADKFQGRVTMTTDTSTSTAYMEIRNLGGDDTAVYYCARWSWSDGYYVYFDYWGQGTSVTVSSGGGGSGGGGSGGGGSDIVMTQSPDSLTVSLGERTTINCKSSQSVLDSSTNKNSLAWYQQKPGQPPKLLLSWASTRESGIPDRFSGSGSGTDFTLTIDSPQPEDSATYYCQQSAHFPITFGQGTRLEIKSGGGGSEVQLVESGGGLVQPGGSLKLSCAASGFTFNKYAINWVRQAPGKGLEWVARIRSKYNNYATYYADAVKDRFTISRDDSKNTVYLQMNNLKTEDTAVYYCARAGNFGSSYISYWAYWGQGTLVTVSSGGGGSGGGGSGGGGSQTVVTQEPSLTVSPGGTVTITCGSSTGAVTSGNYPNWVQKKPGQAPRGLIGGTKFLAPGTPARFSGSLSGGKAALTLSGVQPEDEAEYYCVLWYSNRWVFGSGTKLTVL

SEQ ID NO: 2169 - protein, 505 aa, Artificial Sequence
  Synthetic
QVQLVQSGAEVKKPGESVKVSCKASGYTFTNYGMNWVKQAPGQGLEWMGWINTYTGEPTYADKFQGRVTMTTDTSTSTAYMEIRNLGGDDTAVYYCARWSWSDGYYVYFDYWGQGTSVTVSSGGGGSGGGGSGGGGSDIVMTQSPDSLTVSLGERTTINCKSSQSVLDSSTNKNSLAWYQQKPGQPPKLLLSWASTRESGIPDRFSGSGSGTDFTLTIDSPQPEDSATYYCQQSAHFPITFGQGTRLEIKSGGGGSEVQLVESGGGLVQPGGSLKLSCAASGFTFNKYAMNWVRQAPGKGLEWVARIRSKYNNYATYYAEAVKGRFTISRDDSKNTVYLQMNNLKTEDTAVYYCVRNENIGTSYISYWAYWGQGTLVTVSSGGGGSGGGGSGGGGSQTVVTQEPSLTVSPGGTVTITCGSSTGAVTSGNYPNWVQQKPGQAPRGLIGGTKFLAPGTPARFSGSLSGGKAALTLSGVQPEDEAEYYCVLWYSNRWVFGSGTKLTVL

SEQ ID NO: 2170 - protein, 505 aa, Artificial Sequence
  Synthetic
QVQLVQSGAEVKKPGESVKVSCKASGYTFTNYGMNWVKQAPGQGLEWMGWINTYTGEPTYADKFQGRVTMTTDTSTSTAYMEIRNLGGDDTAVYYCARWSWSDGYYVYFDYWGQGTSVTVSSGGGGSGGGGSGGGGSDIVMTQSPDSLTVSLGERTTINCKSSQSVLDSSTNKNSLAWYQQKPGQPPKLLLSWASTRESGIPDRFSGSGSGTDFTLTIDSPQPEDSATYYCQQSAHFPITFGQGTRLEIKSGGGGSEVQLVESGGGLVQPGGSLKLSCAASGFTFNKYAMNWVRQAPGKGMEWVARIRSKYNNYATYYADAVKDRFTISRDDSKNTLYLQMNNLKTEDTAVYYCVRAGNFGSSYISYFAYWGQGTLVTVSSGGGGSGGGGSGGGGSQTVVTQEPSLTVSPGGTVTITCGSSTGAVTSGNYPNWIQKKPGQAPRGLIGGTKFLAPGTPARFSGSLEGGKAALTLSGVQPEDEAEYYCVLYYSNRWVFGSGTKLTVL

SEQ ID NO: 2171 - protein, 505 aa, Artificial Sequence
  Synthetic
QVQLVQSGAEVKKPGESVKVSCKASGYTFTNYGMNWVKQAPGQGLEWMGWINTYTGEPTYADKFQGRVTMTTDTSTSTAYMEIRNLGGDDTAVYYCARWSWSDGYYVYFDYWGQGTSVTVSSGGGGSGGGGSGGGGSDIVMTQSPDSLTVSLGERTTINCKSSQSVLDSSTNKNSLAWYQQKPGQPPKLLLSWASTRESGIPDRFSGSGSGTDFTLTIDSPQPEDSATYYCQQSAHFPITFGQGTRLEIKSGGGGSEVQLVESGGGLVQPGGSLKLSCAASGFTFNKYAMNWVRQAPGKGMEWVARIRSKYNNYATYYADAVKDRFTISRDDSKNTLYLQMNNLKTEDTAVYYCVRAGNFGTSYISYWAYWGQGTLVTVSSGGGGSGGGGSGGGGSQTVVTQEPSLTVSPGGTVTITCGSSTGAVTSGNYPNWVQKKPGQAPRGLIGGTKFLAPGTPARFSGSLSGGKAALTLSGVQPEDEAEYYCVLWYSNRWVFGSGTKLTVL

SEQ ID NO: 2172 - protein, 505 aa, Artificial Sequence
  Synthetic
QVQLVQSGAEVKKPGESVKVSCKASGYTFTNYGMNWVKQAPGQGLEWMGWINTYTGEPTYADKFQGRVTMTTDTSTSTAYMEIRNLGGDDTAVYYCARWSWSDGYYVYFDYWGQGTSVTVSSGGGGSGGGGSGGGGSDIVMTQSPDSLTVSLGERTTINCKSSQSVLDSSTNKNSLAWYQQKPGQPPKLLLSWASTRESGIPDRFSGSGSGTDFTLTIDSPQPEDSATYYCQQSAHFPITFGQGTRLEIKSGGGGSEVQLVESGGGLVQPGGSLKLSCAASGFTFNKYAINWVREAPGKGLEWVARIRSKYNNYATYYADAVKDRFTISRDDSKNTAYLQMNNLKTEDTAVYYCVRNANFGTSYISYFAYWGQGTLVTVSSGGGGSGGGGSGGGGSQTVVTQEPSLTVSPGGTVTLTCGSSTGAVTSGNYPNWVQKKPGQAPRGLIGGTKFLAPGTPARFSGSLLGGKAALTLSGVQPEDEAEYYCVLWYSNRWVFGSGTKLTVL

SEQ ID NO: 2173 - protein, 993 aa, Artificial Sequence
  Synthetic
QVQLVQSGAEVKKPGESVKVSCKASGYTFTNYGMNWVKQAPGQCLEWMGWINTYTGEPTYADKFQGRVTMTTDTSTSTAYMEIRNLGGDDTAVYYCARWSWSDGYYVYFDYWGQGTSVTVSSGGGGSGGGGSGGGGSDIVMTQSPDSLTVSLGERTTINCKSSQSVLDSSTNKNSLAWYQQKPGQPPKLLLSWASTRESGIPDRFSGSGSGTDFTLTIDSPQPEDSATYYCQQSAHFPITFGCGTRLEIKSGGGGSEVQLVESGGGLVQPGGSLKLSCAASGFTFNKYAMNWVRQAPGKGLEWVARIRSKYNNYATYYADSVKDRFTISRDDSKNTAYLQMNNLKTEDTAVYYCVRHGNFGNSYISYWAYWGQGTLVTVSSGGGGSGGGGSGGGGSQTVVTQEPSLTVSPGGTVTLTCGSSTGAVTSGNYPNWVQQKPGQAPRGLIGGTKFLAPGTPARFSGSLLGGKAALTLSGVQPEDEAEYYCVLWYSNRWVFGGGTKLTVLGGGGDKTHTCPPCPAPELLGGPSVFLFPPKPKDTLMISRTPEVTCVVVDVSHEDPEVKFNWYVDGVEVHNAKTKPCEEQYGSTYRCVSVLTVLHQDWLNGKEYKCKVSNKALPAPIEKTISKAKGQPREPQVYTLPPSREEMTKNQVSLTCLVKGFYPSDIAVEWESNGQPENNYKTTPPVLDSDGSFFLYSKLTVDKSRWQQGNVFSCSVMHEALHNHYTQKSLSLSPGKGGGGSGGGGSGGGGSGGGGSGGGGSGGGGSDKTHTCPPCPAPELLGGPSVFLFPPKPKDTLMISRTPEVTCVVVDVSHEDPEVKFNWYVDGVEVHNAKTKPCEEQYGSTYRCVSVLTVLHQDWLNGKEYKCKVSNKALPAPIEKTISKAKGQPREPQVYTLPPSREEMTKNQVSLTCLVKGFYPSDIAVEWESNGQPENNYKTTPPVLDSDGSFFLYSKLTVDKSRWQQGNVFSCSVMHEALHNHYTQKSLSLSPGK

SEQ ID NO: 2174 - protein, 993 aa, Artificial Sequence
  Synthetic
QVQLVQSGAEVKKPGESVKVSCKASGYTFTNYGMNWVKQAPGQCLEWMGWINTYTGEPTYADKFQGRVTMTTDTSTSTAYMEIRNLGGDDTAVYYCARWSWSDGYYVYFDYWGQGTSVTVSSGGGGSGGGGSGGGGSDIVMTQSPDSLTVSLGERTTINCKSSQSVLDSSTNKNSLAWYQQKPGQPPKLLLSWASTRESGIPDRFSGSGSGTDFTLTIDSPQPEDSATYYCQQSAHFPITFGCGTRLEIKSGGGGSEVQLVESGGGLVQPGGSLKLSCAASGFTFNKYAINWVRQAPGKGLEWVARIRSKYNNYATYYADAVKDRFTISRDDSKNTVYLQMNNLKTEDTAVYYCARAGNFGSSYISYWAYWGQGTLVTVSSGGGGSGGGGSGGGGSQTVVTQEPSLTVSPGGTVTITCGSSTGAVTSGNYPNWVQKKPGQAPRGLIGGTKFLAPGTPARFSGSLSGGKAALTLSGVQPEDEAEYYCVLWYSNRWVFGSGTKLTVLGGGGDKTHTCPPCPAPELLGGPSVFLFPPKPKDTLMISRTPEVTCVVVDVSHEDPEVKFNWYVDGVEVHNAKTKPCEEQYGSTYRCVSVLTVLHQDWLNGKEYKCKVSNKALPAPIEKTISKAKGQPREPQVYTLPPSREEMTKNQVSLTCLVKGFYPSDIAVEWESNGQPENNYKTTPPVLDSDGSFFLYSKLTVDKSRWQQGNVFSCSVMHEALHNHYTQKSLSLSPGKGGGGSGGGGSGGGGSGGGGSGGGGSGGGGSDKTHTCPPCPAPELLGGPSVFLFPPKPKDTLMISRTPEVTCVVVDVSHEDPEVKFNWYVDGVEVHNAKTKPCEEQYGSTYRCVSVLTVLHQDWLNGKEYKCKVSNKALPAPIEKTISKAKGQPREPQVYTLPPSREEMTKNQVSLTCLVKGFYPSDIAVEWESNGQPENNYKTTPPVLDSDGSFFLYSKLTVDKSRWQQGNVFSCSVMHEALHNHYTQKSLSLSPGK

SEQ ID NO: 2175 - protein, 993 aa, Artificial Sequence
  Synthetic
QVQLVQSGAEVKKPGESVKVSCKASGYTFTNYGMNWVKQAPGQCLEWMGWINTYTGEPTYADKFQGRVTMTTDTSTSTAYMEIRNLGGDDTAVYYCARWSWSDGYYVYFDYWGQGTSVTVSSGGGGSGGGGSGGGGSDIVMTQSPDSLTVSLGERTTINCKSSQSVLDSSTNKNSLAWYQQKPGQPPKLLLSWASTRESGIPDRFSGSGSGTDFTLTIDSPQPEDSATYYCQQSAHFPITFGCGTRLEIKSGGGGSEVQLVESGGGLVQPGGSLKLSCAASGFTFNKYAMNWVRQAPGKGLEWVARIRSKYNNYATYYAEAVKGRFTISRDDSKNTVYLQMNNLKTEDTAVYYCVRNENIGTSYISYWAYWGQGTLVTVSSGGGGSGGGGSGGGGSQTVVTQEPSLTVSPGGTVTITCGSSTGAVTSGNYPNWVQQKPGQAPRGLIGGTKFLAPGTPARFSGSLSGGKAALTLSGVQPEDEAEYYCVLWYSNRWVFGSGTKLTVLGGGGDKTHTCPPCPAPELLGGPSVFLFPPKPKDTLMISRTPEVTCVVVDVSHEDPEVKFNWYVDGVEVHNAKTKPCEEQYGSTYRCVSVLTVLHQDWLNGKEYKCKVSNKALPAPIEKTISKAKGQPREPQVYTLPPSREEMTKNQVSLTCLVKGFYPSDIAVEWESNGQPENNYKTTPPVLDSDGSFFLYSKLTVDKSRWQQGNVFSCSVMHEALHNHYTQKSLSLSPGKGGGGSGGGGSGGGGSGGGGSGGGGSGGGGSDKTHTCPPCPAPELLGGPSVFLFPPKPKDTLMISRTPEVTCVVVDVSHEDPEVKFNWYVDGVEVHNAKTKPCEEQYGSTYRCVSVLTVLHQDWLNGKEYKCKVSNKALPAPIEKTISKAKGQPREPQVYTLPPSREEMTKNQVSLTCLVKGFYPSDIAVEWESNGQPENNYKTTPPVLDSDGSFFLYSKLTVDKSRWQQGNVFSCSVMHEALHNHYTQKSLSLSPGK

SEQ ID NO: 2176 - protein, 993 aa, Artificial Sequence
  Synthetic
QVQLVQSGAEVKKPGESVKVSCKASGYTFTNYGMNWVKQAPGQCLEWMGWINTYTGEPTYADKFQGRVTMTTDTSTSTAYMEIRNLGGDDTAVYYCARWSWSDGYYVYFDYWGQGTSVTVSSGGGGSGGGGSGGGGSDIVMTQSPDSLTVSLGERTTINCKSSQSVLDSSTNKNSLAWYQQKPGQPPKLLLSWASTRESGIPDRFSGSGSGTDFTLTIDSPQPEDSATYYCQQSAHFPITFGCGTRLEIKSGGGGSEVQLVESGGGLVQPGGSLKLSCAASGFTFNKYAMNWVRQAPGKGMEWVARIRSKYNNYATYYADAVKDRFTISRDDSKNTLYLQMNNLKTEDTAVYYCVRAGNFGSSYISYFAYWGQGTLVTVSSGGGGSGGGGSGGGGSQTVVTQEPSLTVSPGGTVTITCGSSTGAVTSGNYPNWIQKKPGQAPRGLIGGTKFLAPGTPARFSGSLEGGKAALTLSGVQPEDEAEYYCVLYYSNRWVFGSGTKLTVLGGGGDKTHTCPPCPAPELLGGPSVFLFPPKPKDTLMISRTPEVTCVVVDVSHEDPEVKFNWYVDGVEVHNAKTKPCEEQYGSTYRCVSVLTVLHQDWLNGKEYKCKVSNKALPAPIEKTISKAKGQPREPQVYTLPPSREEMTKNQVSLTCLVKGFYPSDIAVEWESNGQPENNYKTTPPVLDSDGSFFLYSKLTVDKSRWQQGNVFSCSVMHEALHNHYTQKSLSLSPGKGGGGSGGGGSGGGGSGGGGSGGGGSGGGGSDKTHTCPPCPAPELLGGPSVFLFPPKPKDTLMISRTPEVTCVVVDVSHEDPEVKFNWYVDGVEVHNAKTKPCEEQYGSTYRCVSVLTVLHQDWLNGKEYKCKVSNKALPAPIEKTISKAKGQPREPQVYTLPPSREEMTKNQVSLTCLVKGFYPSDIAVEWESNGQPENNYKTTPPVLDSDGSFFLYSKLTVDKSRWQQGNVFSCSVMHEALHNHYTQKSLSLSPGK

SEQ ID NO: 2177 - protein, 993 aa, Artificial Sequence
  Synthetic
QVQLVQSGAEVKKPGESVKVSCKASGYTFTNYGMNWVKQAPGQCLEWMGWINTYTGEPTYADKFQGRVTMTTDTSTSTAYMEIRNLGGDDTAVYYCARWSWSDGYYVYFDYWGQGTSVTVSSGGGGSGGGGSGGGGSDIVMTQSPDSLTVSLGERTTINCKSSQSVLDSSTNKNSLAWYQQKPGQPPKLLLSWASTRESGIPDRFSGSGSGTDFTLTIDSPQPEDSATYYCQQSAHFPITFGCGTRLEIKSGGGGSEVQLVESGGGLVQPGGSLKLSCAASGFTFNKYAMNWVRQAPGKGMEWVARIRSKYNNYATYYADAVKDRFTISRDDSKNTLYLQMNNLKTEDTAVYYCVRAGNFGTSYISYWAYWGQGTLVTVSSGGGGSGGGGSGGGGSQTVVTQEPSLTVSPGGTVTITCGSSTGAVTSGNYPNWVQKKPGQAPRGLIGGTKFLAPGTPARFSGSLSGGKAALTLSGVQPEDEAEYYCVLWYSNRWVFGSGTKLTVLGGGGDKTHTCPPCPAPELLGGPSVFLFPPKPKDTLMISRTPEVTCVVVDVSHEDPEVKFNWYVDGVEVHNAKTKPCEEQYGSTYRCVSVLTVLHQDWLNGKEYKCKVSNKALPAPIEKTISKAKGQPREPQVYTLPPSREEMTKNQVSLTCLVKGFYPSDIAVEWESNGQPENNYKTTPPVLDSDGSFFLYSKLTVDKSRWQQGNVFSCSVMHEALHNHYTQKSLSLSPGKGGGGSGGGGSGGGGSGGGGSGGGGSGGGGSDKTHTCPPCPAPELLGGPSVFLFPPKPKDTLMISRTPEVTCVVVDVSHEDPEVKFNWYVDGVEVHNAKTKPCEEQYGSTYRCVSVLTVLHQDWLNGKEYKCKVSNKALPAPIEKTISKAKGQPREPQVYTLPPSREEMTKNQVSLTCLVKGFYPSDIAVEWESNGQPENNYKTTPPVLDSDGSFFLYSKLTVDKSRWQQGNVFSCSVMHEALHNHYTQKSLSLSPGK

SEQ ID NO: 2178 - protein, 993 aa, Artificial Sequence
  Synthetic
QVQLVQSGAEVKKPGESVKVSCKASGYTFTNYGMNWVKQAPGQCLEWMGWINTYTGEPTYADKFQGRVTMTTDTSTSTAYMEIRNLGGDDTAVYYCARWSWSDGYYVYFDYWGQGTSVTVSSGGGGSGGGGSGGGGSDIVMTQSPDSLTVSLGERTTINCKSSQSVLDSSTNKNSLAWYQQKPGQPPKLLLSWASTRESGIPDRFSGSGSGTDFTLTIDSPQPEDSATYYCQQSAHFPITFGCGTRLEIKSGGGGSEVQLVESGGGLVQPGGSLKLSCAASGFTFNKYAINWVREAPGKGLEWVARIRSKYNNYATYYADAVKDRFTISRDDSKNTAYLQMNNLKTEDTAVYYCVRNANFGTSYISYFAYWGQGTLVTVSSGGGGSGGGGSGGGGSQTVVTQEPSLTVSPGGTVTLTCGSSTGAVTSGNYPNWVQKKPGQAPRGLIGGTKFLAPGTPARFSGSLLGGKAALTLSGVQPEDEAEYYCVLWYSNRWVFGSGTKLTVLGGGGDKTHTCPPCPAPELLGGPSVFLFPPKPKDTLMISRTPEVTCVVVDVSHEDPEVKFNWYVDGVEVHNAKTKPCEEQYGSTYRCVSVLTVLHQDWLNGKEYKCKVSNKALPAPIEKTISKAKGQPREPQVYTLPPSREEMTKNQVSLTCLVKGFYPSDIAVEWESNGQPENNYKTTPPVLDSDGSFFLYSKLTVDKSRWQQGNVFSCSVMHEALHNHYTQKSLSLSPGKGGGGSGGGGSGGGGSGGGGSGGGGSGGGGSDKTHTCPPCPAPELLGGPSVFLFPPKPKDTLMISRTPEVTCVVVDVSHEDPEVKFNWYVDGVEVHNAKTKPCEEQYGSTYRCVSVLTVLHQDWLNGKEYKCKVSNKALPAPIEKTISKAKGQPREPQVYTLPPSREEMTKNQVSLTCLVKGFYPSDIAVEWESNGQPENNYKTTPPVLDSDGSFFLYSKLTVDKSRWQQGNVFSCSVMHEALHNHYTQKSLSLSPGK

SEQ ID NO: 2179 - protein, 5 aa, Artificial Sequence
  Synthetic
TYAMS

SEQ ID NO: 2180 - protein, 17 aa, Artificial Sequence
  Synthetic
AISGSGGRTFYAESVEG

SEQ ID NO: 2181 - protein, 11 aa, Artificial Sequence
  Synthetic
HDYSNYPYFDY

SEQ ID NO: 2182 - protein, 12 aa, Artificial Sequence
  Synthetic
RASQSVRSTYLA

SEQ ID NO: 2183 - protein, 7 aa, Artificial Sequence
  Synthetic
GASSRAT

SEQ ID NO: 2184 - protein, 9 aa, Artificial Sequence
  Synthetic
QQYGDLPFT

SEQ ID NO: 2185 - protein, 120 aa, Artificial Sequence
  Synthetic
EVQLLESGGGMVQPGGSLRLSCAASGFTFSTYAMSWVRQAPGKCLEWVSAISGSGGRTFYAESVEGRFTISRDNSKNTLYLQMNSLRAEDTAVYYCAKHDYSNYPYFDYWGQGTLVTVSS

SEQ ID NO: 2186 - protein, 108 aa, Artificial Sequence
  Synthetic
EIVLTQSPGTLSLSPGERATLSCRASQSVRSTYLAWYQQKPGQAPRLLIYGASSRATGIPDRFSGSGSGTDFTLTISRLEPEDFAVYSCQQYGDLPFTFGCGTKLEIK

SEQ ID NO: 2187 - protein, 986 aa, Artificial Sequence
  Synthetic
EVQLLESGGGMVQPGGSLRLSCAASGFTFSTYAMSWVRQAPGKCLEWVSAISGSGGRTFYAESVEGRFTISRDNSKNTLYLQMNSLRAEDTAVYYCAKHDYSNYPYFDYWGQGTLVTVSSGGGGSGGGGSGGGGSEIVLTQSPGTLSLSPGERATLSCRASQSVRSTYLAWYQQKPGQAPRLLIYGASSRATGIPDRFSGSGSGTDFTLTISRLEPEDFAVYSCQQYGDLPFTFGCGTKLEIKSGGGGSEVQLVESGGGLVQPGGSLKLSCAASGFTFNKYAMNWVRQAPGKGLEWVARIRSKYNNYATYYADSVKDRFTISRDDSKNTAYLQMNNLKTEDTAVYYCVRHGNFGNSYISYWAYWGQGTLVTVSSGGGGSGGGGSGGGGSQTVVTQEPSLTVSPGGTVTLTCGSSTGAVTSGNYPNWVQQKPGQAPRGLIGGTKFLAPGTPARFSGSLLGGKAALTLSGVQPEDEAEYYCVLWYSNRWVFGGGTKLTVLGGGGDKTHTCPPCPAPELLGGPSVFLFPPKPKDTLMISRTPEVTCVVVDVSHEDPEVKFNWYVDGVEVHNAKTKPCEEQYGSTYRCVSVLTVLHQDWLNGKEYKCKVSNKALPAPIEKTISKAKGQPREPQVYTLPPSREEMTKNQVSLTCLVKGFYPSDIAVEWESNGQPENNYKTTPPVLDSDGSFFLYSKLTVDKSRWQQGNVFSCSVMHEALHNHYTQKSLSLSPGKGGGGSGGGGSGGGGSGGGGSGGGGSGGGGSDKTHTCPPCPAPELLGGPSVFLFPPKPKDTLMISRTPEVTCVVVDVSHEDPEVKFNWYVDGVEVHNAKTKPCEEQYGSTYRCVSVLTVLHQDWLNGKEYKCKVSNKALPAPIEKTISKAKGQPREPQVYTLPPSREEMTKNQVSLTCLVKGFYPSDIAVEWESNGQPENNYKTTPPVLDSDGSFFLYSKLTVDKSRWQQGNVFSCSVMHEALHNHYTQKSLSLSPGK

SEQ ID NO: 2188 - protein, 986 aa, Artificial Sequence
  Synthetic
EVQLLESGGGMVQPGGSLRLSCAASGFTFSTYAMSWVRQAPGKCLEWVSAISGSGGRTFYAESVEGRFTISRDNSKNTLYLQMNSLRAEDTAVYYCAKHDYSNYPYFDYWGQGTLVTVSSGGGGSGGGGSGGGGSEIVLTQSPGTLSLSPGERATLSCRASQSVRSTYLAWYQQKPGQAPRLLIYGASSRATGIPDRFSGSGSGTDFTLTISRLEPEDFAVYSCQQYGDLPFTFGCGTKLEIKSGGGGSEVQLVESGGGLVQPGGSLKLSCAASGFTFNKYAINWVRQAPGKGLEWVARIRSKYNNYATYYADAVKDRFTISRDDSKNTVYLQMNNLKTEDTAVYYCARAGNFGSSYISYWAYWGQGTLVTVSSGGGGSGGGGSGGGGSQTVVTQEPSLTVSPGGTVTITCGSSTGAVTSGNYPNWVQKKPGQAPRGLIGGTKFLAPGTPARFSGSLSGGKAALTLSGVQPEDEAEYYCVLWYSNRWVFGSGTKLTVLGGGGDKTHTCPPCPAPELLGGPSVFLFPPKPKDTLMISRTPEVTCVVVDVSHEDPEVKFNWYVDGVEVHNAKTKPCEEQYGSTYRCVSVLTVLHQDWLNGKEYKCKVSNKALPAPIEKTISKAKGQPREPQVYTLPPSREEMTKNQVSLTCLVKGFYPSDIAVEWESNGQPENNYKTTPPVLDSDGSFFLYSKLTVDKSRWQQGNVFSCSVMHEALHNHYTQKSLSLSPGKGGGGSGGGGSGGGGSGGGGSGGGGSGGGGSDKTHTCPPCPAPELLGGPSVFLFPPKPKDTLMISRTPEVTCVVVDVSHEDPEVKFNWYVDGVEVHNAKTKPCEEQYGSTYRCVSVLTVLHQDWLNGKEYKCKVSNKALPAPIEKTISKAKGQPREPQVYTLPPSREEMTKNQVSLTCLVKGFYPSDIAVEWESNGQPENNYKTTPPVLDSDGSFFLYSKLTVDKSRWQQGNVFSCSVMHEALHNHYTQKSLSLSPGK

SEQ ID NO: 2189 - protein, 986 aa, Artificial Sequence
  Synthetic
EVQLLESGGGMVQPGGSLRLSCAASGFTFSTYAMSWVRQAPGKCLEWVSAISGSGGRTFYAESVEGRFTISRDNSKNTLYLQMNSLRAEDTAVYYCAKHDYSNYPYFDYWGQGTLVTVSSGGGGSGGGGSGGGGSEIVLTQSPGTLSLSPGERATLSCRASQSVRSTYLAWYQQKPGQAPRLLIYGASSRATGIPDRFSGSGSGTDFTLTISRLEPEDFAVYSCQQYGDLPFTFGCGTKLEIKSGGGGSEVQLVESGGGLVQPGGSLKLSCAASGFTFNKYAMNWVRQAPGKGLEWVARIRSKYNNYATYYAEAVKGRFTISRDDSKNTVYLQMNNLKTEDTAVYYCVRNENIGTSYISYWAYWGQGTLVTVSSGGGGSGGGGSGGGGSQTVVTQEPSLTVSPGGTVTITCGSSTGAVTSGNYPNWVQQKPGQAPRGLIGGTKFLAPGTPARFSGSLSGGKAALTLSGVQPEDEAEYYCVLWYSNRWVFGSGTKLTVLGGGGDKTHTCPPCPAPELLGGPSVFLFPPKPKDTLMISRTPEVTCVVVDVSHEDPEVKFNWYVDGVEVHNAKTKPCEEQYGSTYRCVSVLTVLHQDWLNGKEYKCKVSNKALPAPIEKTISKAKGQPREPQVYTLPPSREEMTKNQVSLTCLVKGFYPSDIAVEWESNGQPENNYKTTPPVLDSDGSFFLYSKLTVDKSRWQQGNVFSCSVMHEALHNHYTQKSLSLSPGKGGGGSGGGGSGGGGSGGGGSGGGGSGGGGSDKTHTCPPCPAPELLGGPSVFLFPPKPKDTLMISRTPEVTCVVVDVSHEDPEVKFNWYVDGVEVHNAKTKPCEEQYGSTYRCVSVLTVLHQDWLNGKEYKCKVSNKALPAPIEKTISKAKGQPREPQVYTLPPSREEMTKNQVSLTCLVKGFYPSDIAVEWESNGQPENNYKTTPPVLDSDGSFFLYSKLTVDKSRWQQGNVFSCSVMHEALHNHYTQKSLSLSPGK

SEQ ID NO: 2190 - protein, 986 aa, Artificial Sequence
  Synthetic
EVQLLESGGGMVQPGGSLRLSCAASGFTFSTYAMSWVRQAPGKCLEWVSAISGSGGRTFYAESVEGRFTISRDNSKNTLYLQMNSLRAEDTAVYYCAKHDYSNYPYFDYWGQGTLVTVSSGGGGSGGGGSGGGGSEIVLTQSPGTLSLSPGERATLSCRASQSVRSTYLAWYQQKPGQAPRLLIYGASSRATGIPDRFSGSGSGTDFTLTISRLEPEDFAVYSCQQYGDLPFTFGCGTKLEIKSGGGGSEVQLVESGGGLVQPGGSLKLSCAASGFTFNKYAMNWVRQAPGKGMEWVARIRSKYNNYATYYADAVKDRFTISRDDSKNTLYLQMNNLKTEDTAVYYCVRAGNFGSSYISYFAYWGQGTLVTVSSGGGGSGGGGSGGGGSQTVVTQEPSLTVSPGGTVTITCGSSTGAVTSGNYPNWIQKKPGQAPRGLIGGTKFLAPGTPARFSGSLEGGKAALTLSGVQPEDEAEYYCVLYYSNRWVFGSGTKLTVLGGGGDKTHTCPPCPAPELLGGPSVFLFPPKPKDTLMISRTPEVTCVVVDVSHEDPEVKFNWYVDGVEVHNAKTKPCEEQYGSTYRCVSVLTVLHQDWLNGKEYKCKVSNKALPAPIEKTISKAKGQPREPQVYTLPPSREEMTKNQVSLTCLVKGFYPSDIAVEWESNGQPENNYKTTPPVLDSDGSFFLYSKLTVDKSRWQQGNVFSCSVMHEALHNHYTQKSLSLSPGKGGGGSGGGGSGGGGSGGGGSGGGGSGGGGSDKTHTCPPCPAPELLGGPSVFLFPPKPKDTLMISRTPEVTCVVVDVSHEDPEVKFNWYVDGVEVHNAKTKPCEEQYGSTYRCVSVLTVLHQDWLNGKEYKCKVSNKALPAPIEKTISKAKGQPREPQVYTLPPSREEMTKNQVSLTCLVKGFYPSDIAVEWESNGQPENNYKTTPPVLDSDGSFFLYSKLTVDKSRWQQGNVFSCSVMHEALHNHYTQKSLSLSPGK

SEQ ID NO: 2191 - protein, 986 aa, Artificial Sequence
  Synthetic
EVQLLESGGGMVQPGGSLRLSCAASGFTFSTYAMSWVRQAPGKCLEWVSAISGSGGRTFYAESVEGRFTISRDNSKNTLYLQMNSLRAEDTAVYYCAKHDYSNYPYFDYWGQGTLVTVSSGGGGSGGGGSGGGGSEIVLTQSPGTLSLSPGERATLSCRASQSVRSTYLAWYQQKPGQAPRLLIYGASSRATGIPDRFSGSGSGTDFTLTISRLEPEDFAVYSCQQYGDLPFTFGCGTKLEIKSGGGGSEVQLVESGGGLVQPGGSLKLSCAASGFTFNKYAMNWVRQAPGKGMEWVARIRSKYNNYATYYADAVKDRFTISRDDSKNTLYLQMNNLKTEDTAVYYCVRAGNFGTSYISYWAYWGQGTLVTVSSGGGGSGGGGSGGGGSQTVVTQEPSLTVSPGGTVTITCGSSTGAVTSGNYPNWVQKKPGQAPRGLIGGTKFLAPGTPARFSGSLSGGKAALTLSGVQPEDEAEYYCVLWYSNRWVFGSGTKLTVLGGGGDKTHTCPPCPAPELLGGPSVFLFPPKPKDTLMISRTPEVTCVVVDVSHEDPEVKFNWYVDGVEVHNAKTKPCEEQYGSTYRCVSVLTVLHQDWLNGKEYKCKVSNKALPAPIEKTISKAKGQPREPQVYTLPPSREEMTKNQVSLTCLVKGFYPSDIAVEWESNGQPENNYKTTPPVLDSDGSFFLYSKLTVDKSRWQQGNVFSCSVMHEALHNHYTQKSLSLSPGKGGGGSGGGGSGGGGSGGGGSGGGGSGGGGSDKTHTCPPCPAPELLGGPSVFLFPPKPKDTLMISRTPEVTCVVVDVSHEDPEVKFNWYVDGVEVHNAKTKPCEEQYGSTYRCVSVLTVLHQDWLNGKEYKCKVSNKALPAPIEKTISKAKGQPREPQVYTLPPSREEMTKNQVSLTCLVKGFYPSDIAVEWESNGQPENNYKTTPPVLDSDGSFFLYSKLTVDKSRWQQGNVFSCSVMHEALHNHYTQKSLSLSPGK

SEQ ID NO: 2192 - protein, 986 aa, Artificial Sequence
  Synthetic
EVQLLESGGGMVQPGGSLRLSCAASGFTFSTYAMSWVRQAPGKCLEWVSAISGSGGRTFYAESVEGRFTISRDNSKNTLYLQMNSLRAEDTAVYYCAKHDYSNYPYFDYWGQGTLVTVSSGGGGSGGGGSGGGGSEIVLTQSPGTLSLSPGERATLSCRASQSVRSTYLAWYQQKPGQAPRLLIYGASSRATGIPDRFSGSGSGTDFTLTISRLEPEDFAVYSCQQYGDLPFTFGCGTKLEIKSGGGGSEVQLVESGGGLVQPGGSLKLSCAASGFTFNKYAINWVREAPGKGLEWVARIRSKYNNYATYYADAVKDRFTISRDDSKNTAYLQMNNLKTEDTAVYYCVRNANFGTSYISYFAYWGQGTLVTVSSGGGGSGGGGSGGGGSQTVVTQEPSLTVSPGGTVTLTCGSSTGAVTSGNYPNWVQKKPGQAPRGLIGGTKFLAPGTPARFSGSLLGGKAALTLSGVQPEDEAEYYCVLWYSNRWVFGSGTKLTVLGGGGDKTHTCPPCPAPELLGGPSVFLFPPKPKDTLMISRTPEVTCVVVDVSHEDPEVKFNWYVDGVEVHNAKTKPCEEQYGSTYRCVSVLTVLHQDWLNGKEYKCKVSNKALPAPIEKTISKAKGQPREPQVYTLPPSREEMTKNQVSLTCLVKGFYPSDIAVEWESNGQPENNYKTTPPVLDSDGSFFLYSKLTVDKSRWQQGNVFSCSVMHEALHNHYTQKSLSLSPGKGGGGSGGGGSGGGGSGGGGSGGGGSGGGGSDKTHTCPPCPAPELLGGPSVFLFPPKPKDTLMISRTPEVTCVVVDVSHEDPEVKFNWYVDGVEVHNAKTKPCEEQYGSTYRCVSVLTVLHQDWLNGKEYKCKVSNKALPAPIEKTISKAKGQPREPQVYTLPPSREEMTKNQVSLTCLVKGFYPSDIAVEWESNGQPENNYKTTPPVLDSDGSFFLYSKLTVDKSRWQQGNVFSCSVMHEALHNHYTQKSLSLSPGK

SEQ ID NO: 2193 - protein, 5 aa, Artificial Sequence
  Synthetic
SYGMH

SEQ ID NO: 2194 - protein, 17 aa, Artificial Sequence
  Synthetic
FIWYEGSNKYYAESVKD

SEQ ID NO: 2195 - protein, 16 aa, Artificial Sequence
  Synthetic
RAGIIGTIGYYYGMDV

SEQ ID NO: 2196 - protein, 11 aa, Artificial Sequence
  Synthetic
SGDRLGEKYTS

SEQ ID NO: 2197 - protein, 7 aa, Artificial Sequence
  Synthetic
QDTKRPS

SEQ ID NO: 2198 - protein, 9 aa, Artificial Sequence
  Synthetic
QAWESSTVV

SEQ ID NO: 2199 - protein, 125 aa, Artificial Sequence
  Synthetic
QVQLVESGGGVVQPGGSLRLSCAASGFTFSSYGMHWVRQAPGKCLEWVAFIWYEGSNKYYAESVKDRFTISRDNSKNTLYLQMNSLRAEDTAVYYCARRAGIIGTIGYYYGMDVWGQGTTVTVSS

SEQ ID NO: 2200 - protein, 106 aa, Artificial Sequence
  Synthetic
SYELTQPPSVSVSPGQTASITCSGDRLGEKYTSWYQQRPGQSPLLVIYQDTKRPSGIPERFSGSNSGNTATLTISGTQAMDEADYYCQAWESSTVVFGCGTKLTVL

SEQ ID NO: 2201 - protein, 989 aa, Artificial Sequence
  Synthetic
QVQLVESGGGVVQPGGSLRLSCAASGFTFSSYGMHWVRQAPGKCLEWVAFIWYEGSNKYYAESVKDRFTISRDNSKNTLYLQMNSLRAEDTAVYYCARRAGIIGTIGYYYGMDVWGQGTTVTVSSGGGGSGGGGSGGGGSSYELTQPPSVSVSPGQTASITCSGDRLGEKYTSWYQQRPGQSPLLVIYQDTKRPSGIPERFSGSNSGNTATLTISGTQAMDEADYYCQAWESSTVVFGCGTKLTVLSGGGGSEVQLVESGGGLVQPGGSLKLSCAASGFTFNKYAMNWVRQAPGKGLEWVARIRSKYNNYATYYADSVKDRFTISRDDSKNTAYLQMNNLKTEDTAVYYCVRHGNFGNSYISYWAYWGQGTLVTVSSGGGGSGGGGSGGGGSQTVVTQEPSLTVSPGGTVTLTCGSSTGAVTSGNYPNWVQQKPGQAPRGLIGGTKFLAPGTPARFSGSLLGGKAALTLSGVQPEDEAEYYCVLWYSNRWVFGGGTKLTVLGGGGDKTHTCPPCPAPELLGGPSVFLFPPKPKDTLMISRTPEVTCVVVDVSHEDPEVKFNWYVDGVEVHNAKTKPCEEQYGSTYRCVSVLTVLHQDWLNGKEYKCKVSNKALPAPIEKTISKAKGQPREPQVYTLPPSREEMTKNQVSLTCLVKGFYPSDIAVEWESNGQPENNYKTTPPVLDSDGSFFLYSKLTVDKSRWQQGNVFSCSVMHEALHNHYTQKSLSLSPGKGGGGSGGGGSGGGGSGGGGSGGGGSGGGGSDKTHTCPPCPAPELLGGPSVFLFPPKPKDTLMISRTPEVTCVVVDVSHEDPEVKFNWYVDGVEVHNAKTKPCEEQYGSTYRCVSVLTVLHQDWLNGKEYKCKVSNKALPAPIEKTISKAKGQPREPQVYTLPPSREEMTKNQVSLTCLVKGFYPSDIAVEWESNGQPENNYKTTPPVLDSDGSFFLYSKLTVDKSRWQQGNVFSCSVMHEALHNHYTQKSLSLSPGK

SEQ ID NO: 2202 - protein, 987 aa, Artificial Sequence
  Synthetic
QVQLVESGGGVVQPGGSLRLSCAASGFTFSSYGMHWVRQAPGKCLEWVAFIWYEGSNKYYAESVKDRFTISRDNSKNTLYLQMNSLRAEDTAVYYCARRAGIIGTIGYYYGMDVWGQGTTVTVSSGGGGSGGGGSGGGGSSYELTQPPSVSVSPGQTASITCSGDRLGEKYTSWYQQRPGQSPLLVIYQDTKRPSGIPERFSGSNSGNTATLTISGTQAMDEADYYCQAWESSTVVFGCGTKLTVLSGGGGSEVQLVESGGGLVQPGGSLKLSCAASGFTFNKYAMNWVRQAPGKGLEWVARIRSKYNNYATYYADSVKDRFTISRDDSKNTAYLQMNNLKTEDTAVYYCVRHGNFGNSYISYWAYWGQGTLVTVSSGGGGSGGGGSGGGGSQTVVTQEPSLTVSPGGTVTLTCGSSTGAVTSGNYPNWVQQKPGQAPRGLIGGTKFLAPGTPARFSGSLLGGKAALTLSGVQPEDEAEYYCVLWYSNRWVFGGGTKLTVLGGGGDKTHTCPPCPAPELLGGPSVFLFPPKPKDTLMISRTPEVTCVVVDVSHEDPEVKFNWYVDGVEVHNAKTKPCEEQYGSTYRCVSVLTVLHQDWLNGKEYKCKVSNKALPAPIEKTISKAKGQPREPQVYTLPPSREEMTKNQVSLTCLVKGFYPSDIAVEWESNGQPENNYKTTPPVLDSDGSFFLYSKLTVDKSRWQQGNVFSCSVMHEALHNHYTQKSLSLSPGGGGSGGGGSGGGGSGGGGSGGGGSGGGGSDKTHTCPPCPAPELLGGPSVFLFPPKPKDTLMISRTPEVTCVVVDVSHEDPEVKFNWYVDGVEVHNAKTKPCEEQYGSTYRCVSVLTVLHQDWLNGKEYKCKVSNKALPAPIEKTISKAKGQPREPQVYTLPPSREEMTKNQVSLTCLVKGFYPSDIAVEWESNGQPENNYKTTPPVLDSDGSFFLYSKLTVDKSRWQQGNVFSCSVMHEALHNHYTQKSLSLSPGK

SEQ ID NO: 2203 - protein, 989 aa, Artificial Sequence
  Synthetic
QVQLVESGGGVVQPGGSLRLSCAASGFTFSSYGMHWVRQAPGKCLEWVAFIWYEGSNKYYAESVKDRFTISRDNSKNTLYLQMNSLRAEDTAVYYCARRAGIIGTIGYYYGMDVWGQGTTVTVSSGGGGSGGGGSGGGGSSYELTQPPSVSVSPGQTASITCSGDRLGEKYTSWYQQRPGQSPLLVIYQDTKRPSGIPERFSGSNSGNTATLTISGTQAMDEADYYCQAWESSTVVFGCGTKLTVLSGGGGSEVQLVESGGGLVQPGGSLKLSCAASGFTFNKYAINWVRQAPGKGLEWVARIRSKYNNYATYYADAVKDRFTISRDDSKNTVYLQMNNLKTEDTAVYYCARAGNFGSSYISYWAYWGQGTLVTVSSGGGGSGGGGSGGGGSQTVVTQEPSLTVSPGGTVTITCGSSTGAVTSGNYPNWVQKKPGQAPRGLIGGTKFLAPGTPARFSGSLSGGKAALTLSGVQPEDEAEYYCVLWYSNRWVFGSGTKLTVLGGGGDKTHTCPPCPAPELLGGPSVFLFPPKPKDTLMISRTPEVTCVVVDVSHEDPEVKFNWYVDGVEVHNAKTKPCEEQYGSTYRCVSVLTVLHQDWLNGKEYKCKVSNKALPAPIEKTISKAKGQPREPQVYTLPPSREEMTKNQVSLTCLVKGFYPSDIAVEWESNGQPENNYKTTPPVLDSDGSFFLYSKLTVDKSRWQQGNVFSCSVMHEALHNHYTQKSLSLSPGKGGGGSGGGGSGGGGSGGGGSGGGGSGGGGSDKTHTCPPCPAPELLGGPSVFLFPPKPKDTLMISRTPEVTCVVVDVSHEDPEVKFNWYVDGVEVHNAKTKPCEEQYGSTYRCVSVLTVLHQDWLNGKEYKCKVSNKALPAPIEKTISKAKGQPREPQVYTLPPSREEMTKNQVSLTCLVKGFYPSDIAVEWESNGQPENNYKTTPPVLDSDGSFFLYSKLTVDKSRWQQGNVFSCSVMHEALHNHYTQKSLSLSPGK

SEQ ID NO: 2204 - protein, 987 aa, Artificial Sequence
  Synthetic
QVQLVESGGGVVQPGGSLRLSCAASGFTFSSYGMHWVRQAPGKCLEWVAFIWYEGSNKYYAESVKDRFTISRDNSKNTLYLQMNSLRAEDTAVYYCARRAGIIGTIGYYYGMDVWGQGTTVTVSSGGGGSGGGGSGGGGSSYELTQPPSVSVSPGQTASITCSGDRLGEKYTSWYQQRPGQSPLLVIYQDTKRPSGIPERFSGSNSGNTATLTISGTQAMDEADYYCQAWESSTVVFGCGTKLTVLSGGGGSEVQLVESGGGLVQPGGSLKLSCAASGFTFNKYAINWVRQAPGKGLEWVARIRSKYNNYATYYADAVKDRFTISRDDSKNTVYLQMNNLKTEDTAVYYCARAGNFGSSYISYWAYWGQGTLVTVSSGGGGSGGGGSGGGGSQTVVTQEPSLTVSPGGTVTITCGSSTGAVTSGNYPNWVQKKPGQAPRGLIGGTKFLAPGTPARFSGSLSGGKAALTLSGVQPEDEAEYYCVLWYSNRWVFGSGTKLTVLGGGGDKTHTCPPCPAPELLGGPSVFLFPPKPKDTLMISRTPEVTCVVVDVSHEDPEVKFNWYVDGVEVHNAKTKPCEEQYGSTYRCVSVLTVLHQDWLNGKEYKCKVSNKALPAPIEKTISKAKGQPREPQVYTLPPSREEMTKNQVSLTCLVKGFYPSDIAVEWESNGQPENNYKTTPPVLDSDGSFFLYSKLTVDKSRWQQGNVFSCSVMHEALHNHYTQKSLSLSPGGGGSGGGGSGGGGSGGGGSGGGGSGGGGSDKTHTCPPCPAPELLGGPSVFLFPPKPKDTLMISRTPEVTCVVVDVSHEDPEVKFNWYVDGVEVHNAKTKPCEEQYGSTYRCVSVLTVLHQDWLNGKEYKCKVSNKALPAPIEKTISKAKGQPREPQVYTLPPSREEMTKNQVSLTCLVKGFYPSDIAVEWESNGQPENNYKTTPPVLDSDGSFFLYSKLTVDKSRWQQGNVFSCSVMHEALHNHYTQKSLSLSPGK

SEQ ID NO: 2205 - protein, 989 aa, Artificial Sequence
  Synthetic
QVQLVESGGGVVQPGGSLRLSCAASGFTFSSYGMHWVRQAPGKCLEWVAFIWYEGSNKYYAESVKDRFTISRDNSKNTLYLQMNSLRAEDTAVYYCARRAGIIGTIGYYYGMDVWGQGTTVTVSSGGGGSGGGGSGGGGSSYELTQPPSVSVSPGQTASITCSGDRLGEKYTSWYQQRPGQSPLLVIYQDTKRPSGIPERFSGSNSGNTATLTISGTQAMDEADYYCQAWESSTVVFGCGTKLTVLSGGGGSEVQLVESGGGLVQPGGSLKLSCAASGFTFNKYAMNWVRQAPGKGLEWVARIRSKYNNYATYYAEAVKGRFTISRDDSKNTVYLQMNNLKTEDTAVYYCVRNENIGTSYISYWAYWGQGTLVTVSSGGGGSGGGGSGGGGSQTVVTQEPSLTVSPGGTVTITCGSSTGAVTSGNYPNWVQQKPGQAPRGLIGGTKFLAPGTPARFSGSLSGGKAALTLSGVQPEDEAEYYCVLWYSNRWVFGSGTKLTVLGGGGDKTHTCPPCPAPELLGGPSVFLFPPKPKDTLMISRTPEVTCVVVDVSHEDPEVKFNWYVDGVEVHNAKTKPCEEQYGSTYRCVSVLTVLHQDWLNGKEYKCKVSNKALPAPIEKTISKAKGQPREPQVYTLPPSREEMTKNQVSLTCLVKGFYPSDIAVEWESNGQPENNYKTTPPVLDSDGSFFLYSKLTVDKSRWQQGNVFSCSVMHEALHNHYTQKSLSLSPGKGGGGSGGGGSGGGGSGGGGSGGGGSGGGGSDKTHTCPPCPAPELLGGPSVFLFPPKPKDTLMISRTPEVTCVVVDVSHEDPEVKFNWYVDGVEVHNAKTKPCEEQYGSTYRCVSVLTVLHQDWLNGKEYKCKVSNKALPAPIEKTISKAKGQPREPQVYTLPPSREEMTKNQVSLTCLVKGFYPSDIAVEWESNGQPENNYKTTPPVLDSDGSFFLYSKLTVDKSRWQQGNVFSCSVMHEALHNHYTQKSLSLSPGK

SEQ ID NO: 2206 - protein, 987 aa, Artificial Sequence
  Synthetic
QVQLVESGGGVVQPGGSLRLSCAASGFTFSSYGMHWVRQAPGKCLEWVAFIWYEGSNKYYAESVKDRFTISRDNSKNTLYLQMNSLRAEDTAVYYCARRAGIIGTIGYYYGMDVWGQGTTVTVSSGGGGSGGGGSGGGGSSYELTQPPSVSVSPGQTASITCSGDRLGEKYTSWYQQRPGQSPLLVIYQDTKRPSGIPERFSGSNSGNTATLTISGTQAMDEADYYCQAWESSTVVFGCGTKLTVLSGGGGSEVQLVESGGGLVQPGGSLKLSCAASGFTFNKYAMNWVRQAPGKGLEWVARIRSKYNNYATYYAEAVKGRFTISRDDSKNTVYLQMNNLKTEDTAVYYCVRNENIGTSYISYWAYWGQGTLVTVSSGGGGSGGGGSGGGGSQTVVTQEPSLTVSPGGTVTITCGSSTGAVTSGNYPNWVQQKPGQAPRGLIGGTKFLAPGTPARFSGSLSGGKAALTLSGVQPEDEAEYYCVLWYSNRWVFGSGTKLTVLGGGGDKTHTCPPCPAPELLGGPSVFLFPPKPKDTLMISRTPEVTCVVVDVSHEDPEVKFNWYVDGVEVHNAKTKPCEEQYGSTYRCVSVLTVLHQDWLNGKEYKCKVSNKALPAPIEKTISKAKGQPREPQVYTLPPSREEMTKNQVSLTCLVKGFYPSDIAVEWESNGQPENNYKTTPPVLDSDGSFFLYSKLTVDKSRWQQGNVFSCSVMHEALHNHYTQKSLSLSPGGGGSGGGGSGGGGSGGGGSGGGGSGGGGSDKTHTCPPCPAPELLGGPSVFLFPPKPKDTLMISRTPEVTCVVVDVSHEDPEVKFNWYVDGVEVHNAKTKPCEEQYGSTYRCVSVLTVLHQDWLNGKEYKCKVSNKALPAPIEKTISKAKGQPREPQVYTLPPSREEMTKNQVSLTCLVKGFYPSDIAVEWESNGQPENNYKTTPPVLDSDGSFFLYSKLTVDKSRWQQGNVFSCSVMHEALHNHYTQKSLSLSPGK

SEQ ID NO: 2207 - protein, 989 aa, Artificial Sequence
  Synthetic
QVQLVESGGGVVQPGGSLRLSCAASGFTFSSYGMHWVRQAPGKCLEWVAFIWYEGSNKYYAESVKDRFTISRDNSKNTLYLQMNSLRAEDTAVYYCARRAGIIGTIGYYYGMDVWGQGTTVTVSSGGGGSGGGGSGGGGSSYELTQPPSVSVSPGQTASITCSGDRLGEKYTSWYQQRPGQSPLLVIYQDTKRPSGIPERFSGSNSGNTATLTISGTQAMDEADYYCQAWESSTVVFGCGTKLTVLSGGGGSEVQLVESGGGLVQPGGSLKLSCAASGFTFNKYAMNWVRQAPGKGMEWVARIRSKYNNYATYYADAVKDRFTISRDDSKNTLYLQMNNLKTEDTAVYYCVRAGNFGSSYISYFAYWGQGTLVTVSSGGGGSGGGGSGGGGSQTVVTQEPSLTVSPGGTVTITCGSSTGAVTSGNYPNWIQKKPGQAPRGLIGGTKFLAPGTPARFSGSLEGGKAALTLSGVQPEDEAEYYCVLYYSNRWVFGSGTKLTVLGGGGDKTHTCPPCPAPELLGGPSVFLFPPKPKDTLMISRTPEVTCVVVDVSHEDPEVKFNWYVDGVEVHNAKTKPCEEQYGSTYRCVSVLTVLHQDWLNGKEYKCKVSNKALPAPIEKTISKAKGQPREPQVYTLPPSREEMTKNQVSLTCLVKGFYPSDIAVEWESNGQPENNYKTTPPVLDSDGSFFLYSKLTVDKSRWQQGNVFSCSVMHEALHNHYTQKSLSLSPGKGGGGSGGGGSGGGGSGGGGSGGGGSGGGGSDKTHTCPPCPAPELLGGPSVFLFPPKPKDTLMISRTPEVTCVVVDVSHEDPEVKFNWYVDGVEVHNAKTKPCEEQYGSTYRCVSVLTVLHQDWLNGKEYKCKVSNKALPAPIEKTISKAKGQPREPQVYTLPPSREEMTKNQVSLTCLVKGFYPSDIAVEWESNGQPENNYKTTPPVLDSDGSFFLYSKLTVDKSRWQQGNVFSCSVMHEALHNHYTQKSLSLSPGK

SEQ ID NO: 2208 - protein, 987 aa, Artificial Sequence
  Synthetic
QVQLVESGGGVVQPGGSLRLSCAASGFTFSSYGMHWVRQAPGKCLEWVAFIWYEGSNKYYAESVKDRFTISRDNSKNTLYLQMNSLRAEDTAVYYCARRAGIIGTIGYYYGMDVWGQGTTVTVSSGGGGSGGGGSGGGGSSYELTQPPSVSVSPGQTASITCSGDRLGEKYTSWYQQRPGQSPLLVIYQDTKRPSGIPERFSGSNSGNTATLTISGTQAMDEADYYCQAWESSTVVFGCGTKLTVLSGGGGSEVQLVESGGGLVQPGGSLKLSCAASGFTFNKYAMNWVRQAPGKGMEWVARIRSKYNNYATYYADAVKDRFTISRDDSKNTLYLQMNNLKTEDTAVYYCVRAGNFGSSYISYFAYWGQGTLVTVSSGGGGSGGGGSGGGGSQTVVTQEPSLTVSPGGTVTITCGSSTGAVTSGNYPNWIQKKPGQAPRGLIGGTKFLAPGTPARFSGSLEGGKAALTLSGVQPEDEAEYYCVLYYSNRWVFGSGTKLTVLGGGGDKTHTCPPCPAPELLGGPSVFLFPPKPKDTLMISRTPEVTCVVVDVSHEDPEVKFNWYVDGVEVHNAKTKPCEEQYGSTYRCVSVLTVLHQDWLNGKEYKCKVSNKALPAPIEKTISKAKGQPREPQVYTLPPSREEMTKNQVSLTCLVKGFYPSDIAVEWESNGQPENNYKTTPPVLDSDGSFFLYSKLTVDKSRWQQGNVFSCSVMHEALHNHYTQKSLSLSPGGGGSGGGGSGGGGSGGGGSGGGGSGGGGSDKTHTCPPCPAPELLGGPSVFLFPPKPKDTLMISRTPEVTCVVVDVSHEDPEVKFNWYVDGVEVHNAKTKPCEEQYGSTYRCVSVLTVLHQDWLNGKEYKCKVSNKALPAPIEKTISKAKGQPREPQVYTLPPSREEMTKNQVSLTCLVKGFYPSDIAVEWESNGQPENNYKTTPPVLDSDGSFFLYSKLTVDKSRWQQGNVFSCSVMHEALHNHYTQKSLSLSPGK

SEQ ID NO: 2209 - protein, 989 aa, Artificial Sequence
  Synthetic
QVQLVESGGGVVQPGGSLRLSCAASGFTFSSYGMHWVRQAPGKCLEWVAFIWYEGSNKYYAESVKDRFTISRDNSKNTLYLQMNSLRAEDTAVYYCARRAGIIGTIGYYYGMDVWGQGTTVTVSSGGGGSGGGGSGGGGSSYELTQPPSVSVSPGQTASITCSGDRLGEKYTSWYQQRPGQSPLLVIYQDTKRPSGIPERFSGSNSGNTATLTISGTQAMDEADYYCQAWESSTVVFGCGTKLTVLSGGGGSEVQLVESGGGLVQPGGSLKLSCAASGFTFNKYAMNWVRQAPGKGMEWVARIRSKYNNYATYYADAVKDRFTISRDDSKNTLYLQMNNLKTEDTAVYYCVRAGNFGTSYISYWAYWGQGTLVTVSSGGGGSGGGGSGGGGSQTVVTQEPSLTVSPGGTVTITCGSSTGAVTSGNYPNWVQKKPGQAPRGLIGGTKFLAPGTPARFSGSLSGGKAALTLSGVQPEDEAEYYCVLWYSNRWVFGSGTKLTVLGGGGDKTHTCPPCPAPELLGGPSVFLFPPKPKDTLMISRTPEVTCVVVDVSHEDPEVKFNWYVDGVEVHNAKTKPCEEQYGSTYRCVSVLTVLHQDWLNGKEYKCKVSNKALPAPIEKTISKAKGQPREPQVYTLPPSREEMTKNQVSLTCLVKGFYPSDIAVEWESNGQPENNYKTTPPVLDSDGSFFLYSKLTVDKSRWQQGNVFSCSVMHEALHNHYTQKSLSLSPGKGGGGSGGGGSGGGGSGGGGSGGGGSGGGGSDKTHTCPPCPAPELLGGPSVFLFPPKPKDTLMISRTPEVTCVVVDVSHEDPEVKFNWYVDGVEVHNAKTKPCEEQYGSTYRCVSVLTVLHQDWLNGKEYKCKVSNKALPAPIEKTISKAKGQPREPQVYTLPPSREEMTKNQVSLTCLVKGFYPSDIAVEWESNGQPENNYKTTPPVLDSDGSFFLYSKLTVDKSRWQQGNVFSCSVMHEALHNHYTQKSLSLSPGK

SEQ ID NO: 2210 - protein, 987 aa, Artificial Sequence
  Synthetic
QVQLVESGGGVVQPGGSLRLSCAASGFTFSSYGMHWVRQAPGKCLEWVAFIWYEGSNKYYAESVKDRFTISRDNSKNTLYLQMNSLRAEDTAVYYCARRAGIIGTIGYYYGMDVWGQGTTVTVSSGGGGSGGGGSGGGGSSYELTQPPSVSVSPGQTASITCSGDRLGEKYTSWYQQRPGQSPLLVIYQDTKRPSGIPERFSGSNSGNTATLTISGTQAMDEADYYCQAWESSTVVFGCGTKLTVLSGGGGSEVQLVESGGGLVQPGGSLKLSCAASGFTFNKYAMNWVRQAPGKGMEWVARIRSKYNNYATYYADAVKDRFTISRDDSKNTLYLQMNNLKTEDTAVYYCVRAGNFGTSYISYWAYWGQGTLVTVSSGGGGSGGGGSGGGGSQTVVTQEPSLTVSPGGTVTITCGSSTGAVTSGNYPNWVQKKPGQAPRGLIGGTKFLAPGTPARFSGSLSGGKAALTLSGVQPEDEAEYYCVLWYSNRWVFGSGTKLTVLGGGGDKTHTCPPCPAPELLGGPSVFLFPPKPKDTLMISRTPEVTCVVVDVSHEDPEVKFNWYVDGVEVHNAKTKPCEEQYGSTYRCVSVLTVLHQDWLNGKEYKCKVSNKALPAPIEKTISKAKGQPREPQVYTLPPSREEMTKNQVSLTCLVKGFYPSDIAVEWESNGQPENNYKTTPPVLDSDGSFFLYSKLTVDKSRWQQGNVFSCSVMHEALHNHYTQKSLSLSPGGGGSGGGGSGGGGSGGGGSGGGGSGGGGSDKTHTCPPCPAPELLGGPSVFLFPPKPKDTLMISRTPEVTCVVVDVSHEDPEVKFNWYVDGVEVHNAKTKPCEEQYGSTYRCVSVLTVLHQDWLNGKEYKCKVSNKALPAPIEKTISKAKGQPREPQVYTLPPSREEMTKNQVSLTCLVKGFYPSDIAVEWESNGQPENNYKTTPPVLDSDGSFFLYSKLTVDKSRWQQGNVFSCSVMHEALHNHYTQKSLSLSPGK

SEQ ID NO: 2211 - protein, 989 aa, Artificial Sequence
  Synthetic
QVQLVESGGGVVQPGGSLRLSCAASGFTFSSYGMHWVRQAPGKCLEWVAFIWYEGSNKYYAESVKDRFTISRDNSKNTLYLQMNSLRAEDTAVYYCARRAGIIGTIGYYYGMDVWGQGTTVTVSSGGGGSGGGGSGGGGSSYELTQPPSVSVSPGQTASITCSGDRLGEKYTSWYQQRPGQSPLLVIYQDTKRPSGIPERFSGSNSGNTATLTISGTQAMDEADYYCQAWESSTVVFGCGTKLTVLSGGGGSEVQLVESGGGLVQPGGSLKLSCAASGFTFNKYAINWVREAPGKGLEWVARIRSKYNNYATYYADAVKDRFTISRDDSKNTAYLQMNNLKTEDTAVYYCVRNANFGTSYISYFAYWGQGTLVTVSSGGGGSGGGGSGGGGSQTVVTQEPSLTVSPGGTVTLTCGSSTGAVTSGNYPNWVQKKPGQAPRGLIGGTKFLAPGTPARFSGSLLGGKAALTLSGVQPEDEAEYYCVLWYSNRWVFGSGTKLTVLGGGGDKTHTCPPCPAPELLGGPSVFLFPPKPKDTLMISRTPEVTCVVVDVSHEDPEVKFNWYVDGVEVHNAKTKPCEEQYGSTYRCVSVLTVLHQDWLNGKEYKCKVSNKALPAPIEKTISKAKGQPREPQVYTLPPSREEMTKNQVSLTCLVKGFYPSDIAVEWESNGQPENNYKTTPPVLDSDGSFFLYSKLTVDKSRWQQGNVFSCSVMHEALHNHYTQKSLSLSPGKGGGGSGGGGSGGGGSGGGGSGGGGSGGGGSDKTHTCPPCPAPELLGGPSVFLFPPKPKDTLMISRTPEVTCVVVDVSHEDPEVKFNWYVDGVEVHNAKTKPCEEQYGSTYRCVSVLTVLHQDWLNGKEYKCKVSNKALPAPIEKTISKAKGQPREPQVYTLPPSREEMTKNQVSLTCLVKGFYPSDIAVEWESNGQPENNYKTTPPVLDSDGSFFLYSKLTVDKSRWQQGNVFSCSVMHEALHNHYTQKSLSLSPGK

SEQ ID NO: 2212 - protein, 987 aa, Artificial Sequence
  Synthetic
QVQLVESGGGVVQPGGSLRLSCAASGFTFSSYGMHWVRQAPGKCLEWVAFIWYEGSNKYYAESVKDRFTISRDNSKNTLYLQMNSLRAEDTAVYYCARRAGIIGTIGYYYGMDVWGQGTTVTVSSGGGGSGGGGSGGGGSSYELTQPPSVSVSPGQTASITCSGDRLGEKYTSWYQQRPGQSPLLVIYQDTKRPSGIPERFSGSNSGNTATLTISGTQAMDEADYYCQAWESSTVVFGCGTKLTVLSGGGGSEVQLVESGGGLVQPGGSLKLSCAASGFTFNKYAINWVREAPGKGLEWVARIRSKYNNYATYYADAVKDRFTISRDDSKNTAYLQMNNLKTEDTAVYYCVRNANFGTSYISYFAYWGQGTLVTVSSGGGGSGGGGSGGGGSQTVVTQEPSLTVSPGGTVTLTCGSSTGAVTSGNYPNWVQKKPGQAPRGLIGGTKFLAPGTPARFSGSLLGGKAALTLSGVQPEDEAEYYCVLWYSNRWVFGSGTKLTVLGGGGDKTHTCPPCPAPELLGGPSVFLFPPKPKDTLMISRTPEVTCVVVDVSHEDPEVKFNWYVDGVEVHNAKTKPCEEQYGSTYRCVSVLTVLHQDWLNGKEYKCKVSNKALPAPIEKTISKAKGQPREPQVYTLPPSREEMTKNQVSLTCLVKGFYPSDIAVEWESNGQPENNYKTTPPVLDSDGSFFLYSKLTVDKSRWQQGNVFSCSVMHEALHNHYTQKSLSLSPGGGGSGGGGSGGGGSGGGGSGGGGSGGGGSDKTHTCPPCPAPELLGGPSVFLFPPKPKDTLMISRTPEVTCVVVDVSHEDPEVKFNWYVDGVEVHNAKTKPCEEQYGSTYRCVSVLTVLHQDWLNGKEYKCKVSNKALPAPIEKTISKAKGQPREPQVYTLPPSREEMTKNQVSLTCLVKGFYPSDIAVEWESNGQPENNYKTTPPVLDSDGSFFLYSKLTVDKSRWQQGNVFSCSVMHEALHNHYTQKSLSLSPGK

SEQ ID NO: 2213 - protein, 5 aa, Artificial Sequence
  Synthetic
NYWMN

SEQ ID NO: 2214 - protein, 17 aa, Artificial Sequence
  Synthetic
NIAYGVKGTNYNQKFQG

SEQ ID NO: 2215 - protein, 8 aa, Artificial Sequence
  Synthetic
RYFYVMDY

SEQ ID NO: 2216 - protein, 11 aa, Artificial Sequence
  Synthetic
RASQDISNYLN

SEQ ID NO: 2217 - protein, 7 aa, Artificial Sequence
  Synthetic
YTSRLHS

SEQ ID NO: 2218 - protein, 9 aa, Artificial Sequence
  Synthetic
VQYAQFPLT

SEQ ID NO: 2219 - protein, 117 aa, Artificial Sequence
  Synthetic
QVQLVQSGAEVKKPGASVKVSCKASGYTFTNYWMNWVRQAPGQCLEWMGNIAYGVKGTNYNQKFQGRVTMTVDTSSSTAYMELSRLRSDDTAVYYCATRYFYVMDYWGQGTLVTVSS

SEQ ID NO: 2220 - protein, 107 aa, Artificial Sequence
  Synthetic
DIQMTQSPSSLSASVGDRVTITCRASQDISNYLNWYQQKPGKVPKLLIYYTSRLHSGVPSRFSGSGSGTDFTLTISSLQPEDVATYYCVQYAQFPLTFGCGTKVEIK

SEQ ID NO: 2221 - protein, 107 aa, Artificial Sequence
  Synthetic
EIQMTQSPSSLSASVGDRVTITCRASQDISNYLNWYQQKPGKVPKLLIYYTSRLHSGVPSRFSGSGSGTDFTLTISSLQPEDVATYYCVQYAQFPLTFGCGTKVEIK

SEQ ID NO: 2222 - protein, 5 aa, Artificial Sequence
  Synthetic
SYPIN

SEQ ID NO: 2223 - protein, 16 aa, Artificial Sequence
  Synthetic
VIWTGGGTNYASSVKG

SEQ ID NO: 2224 - protein, 15 aa, Artificial Sequence
  Synthetic
SRGVYDFDGRGAMDY

SEQ ID NO: 2225 - protein, 17 aa, Artificial Sequence
  Synthetic
KSSQSLLYSSNQKNYFA

SEQ ID NO: 2226 - protein, 7 aa, Artificial Sequence
  Synthetic
WASTRES

SEQ ID NO: 2227 - protein, 9 aa, Artificial Sequence
  Synthetic
QQYYSYPYT

SEQ ID NO: 2228 - protein, 123 aa, Artificial Sequence
  Synthetic
EVQLLESGGGLVQPGGSLRLSCAASGFSFSSYPINWVRQAPGKGLEWVGVIWTGGGTNYASSVKGRFTISRDNSKNTVYLQMNSLRAEDTAVYYCAKSRGVYDFDGRGAMDYWGQGTLVTVSS

SEQ ID NO: 2229 - protein, 113 aa, Artificial Sequence
  Synthetic
DIVMTQSPDSLAVSLGERATINCKSSQSLLYSSNQKNYFAWYQQKPGQPPKLLIYWASTRESGVPDRFSGSGSGTDFTLTISSLQAEDVAVYYCQQYYSYPYTFGQGTKLEIK

SEQ ID NO: 2230 - protein, 113 aa, Artificial Sequence
  Synthetic
EIVMTQSPDSLAVSLGERATINCKSSQSLLYSSNQKNYFAWYQQKPGQPPKLLIYWASTRESGVPDRFSGSGSGTDFTLTISSLQAEDVAVYYCQQYYSYPYTFGQGTKLEIK

SEQ ID NO: 2231 - protein, 5 aa, Artificial Sequence
  Synthetic
SYWMH

SEQ ID NO: 2232 - protein, 17 aa, Artificial Sequence
  Synthetic
KIDPSDDYTNYNQKVKG

SEQ ID NO: 2233 - protein, 8 aa, Artificial Sequence
  Synthetic
WDYSHFDV

SEQ ID NO: 2234 - protein, 10 aa, Artificial Sequence
  Synthetic
RASSSVSYMH

SEQ ID NO: 2235 - protein, 7 aa, Artificial Sequence
  Synthetic
GTSNLVS

SEQ ID NO: 2236 - protein, 9 aa, Artificial Sequence
  Synthetic
QQWSSYPLT

SEQ ID NO: 2237 - protein, 117 aa, Artificial Sequence
  Synthetic
EVQLLESGGGLVQPGGSLRLSCAASGFTFSSYWMHWVRQTPGKCLEWVSKIDPSDDYTNYNQKVKGRFTISIDKSKNTLYLQMNSLRAEDTAVYYCARWDYSHFDVWGQGTTVTVSS

SEQ ID NO: 2238 - protein, 106 aa, Artificial Sequence
  Synthetic
EIVMTQSPATLSVSPGERATLTCRASSSVSYMHWYQQKPGQAPRLLIYGTSNLVSGVPARFSGSGSGTEFTLTISSLQSEDFAVYYCQQWSSYPLTFGCGTKVEIK

SEQ ID NO: 2239 - protein, 982 aa, Artificial Sequence
  Synthetic
QVQLVQSGAEVKKPGASVKVSCKASGYTFTNYWMNWVRQAPGQCLEWMGNIAYGVKGTNYNQKFQGRVTMTVDTSSSTAYMELSRLRSDDTAVYYCATRYFYVMDYWGQGTLVTVSSGGGGSGGGGSGGGGSDIQMTQSPSSLSASVGDRVTITCRASQDISNYLNWYQQKPGKVPKLLIYYTSRLHSGVPSRFSGSGSGTDFTLTISSLQPEDVATYYCVQYAQFPLTFGCGTKVEIKSGGGGSEVQLVESGGGLVQPGGSLKLSCAASGFTFNKYAMNWVRQAPGKGLEWVARIRSKYNNYATYYADSVKDRFTISRDDSKNTAYLQMNNLKTEDTAVYYCVRHGNFGNSYISYWAYWGQGTLVTVSSGGGGSGGGGSGGGGSQTVVTQEPSLTVSPGGTVTLTCGSSTGAVTSGNYPNWVQQKPGQAPRGLIGGTKFLAPGTPARFSGSLLGGKAALTLSGVQPEDEAEYYCVLWYSNRWVFGGGTKLTVLGGGGDKTHTCPPCPAPELLGGPSVFLFPPKPKDTLMISRTPEVTCVVVDVSHEDPEVKFNWYVDGVEVHNAKTKPCEEQYGSTYRCVSVLTVLHQDWLNGKEYKCKVSNKALPAPIEKTISKAKGQPREPQVYTLPPSREEMTKNQVSLTCLVKGFYPSDIAVEWESNGQPENNYKTTPPVLDSDGSFFLYSKLTVDKSRWQQGNVFSCSVMHEALHNHYTQKSLSLSPGKGGGGSGGGGSGGGGSGGGGSGGGGSGGGGSDKTHTCPPCPAPELLGGPSVFLFPPKPKDTLMISRTPEVTCVVVDVSHEDPEVKFNWYVDGVEVHNAKTKPCEEQYGSTYRCVSVLTVLHQDWLNGKEYKCKVSNKALPAPIEKTISKAKGQPREPQVYTLPPSREEMTKNQVSLTCLVKGFYPSDIAVEWESNGQPENNYKTTPPVLDSDGSFFLYSKLTVDKSRWQQGNVFSCSVMHEALHNHYTQKSLSLSPGK

SEQ ID NO: 2240 - protein, 982 aa, Artificial Sequence
  Synthetic
QVQLVQSGAEVKKPGASVKVSCKASGYTFTNYWMNWVRQAPGQCLEWMGNIAYGVKGTNYNQKFQGRVTMTVDTSSSTAYMELSRLRSDDTAVYYCATRYFYVMDYWGQGTLVTVSSGGGGSGGGGSGGGGSDIQMTQSPSSLSASVGDRVTITCRASQDISNYLNWYQQKPGKVPKLLIYYTSRLHSGVPSRFSGSGSGTDFTLTISSLQPEDVATYYCVQYAQFPLTFGCGTKVEIKSGGGGSEVQLVESGGGLVQPGGSLKLSCAASGFTFNKYAINWVRQAPGKGLEWVARIRSKYNNYATYYADAVKDRFTISRDDSKNTVYLQMNNLKTEDTAVYYCARAGNFGSSYISYWAYWGQGTLVTVSSGGGGSGGGGSGGGGSQTVVTQEPSLTVSPGGTVTITCGSSTGAVTSGNYPNWVQKKPGQAPRGLIGGTKFLAPGTPARFSGSLSGGKAALTLSGVQPEDEAEYYCVLWYSNRWVFGSGTKLTVLGGGGDKTHTCPPCPAPELLGGPSVFLFPPKPKDTLMISRTPEVTCVVVDVSHEDPEVKFNWYVDGVEVHNAKTKPCEEQYGSTYRCVSVLTVLHQDWLNGKEYKCKVSNKALPAPIEKTISKAKGQPREPQVYTLPPSREEMTKNQVSLTCLVKGFYPSDIAVEWESNGQPENNYKTTPPVLDSDGSFFLYSKLTVDKSRWQQGNVFSCSVMHEALHNHYTQKSLSLSPGKGGGGSGGGGSGGGGSGGGGSGGGGSGGGGSDKTHTCPPCPAPELLGGPSVFLFPPKPKDTLMISRTPEVTCVVVDVSHEDPEVKFNWYVDGVEVHNAKTKPCEEQYGSTYRCVSVLTVLHQDWLNGKEYKCKVSNKALPAPIEKTISKAKGQPREPQVYTLPPSREEMTKNQVSLTCLVKGFYPSDIAVEWESNGQPENNYKTTPPVLDSDGSFFLYSKLTVDKSRWQQGNVFSCSVMHEALHNHYTQKSLSLSPGK

SEQ ID NO: 2241 - protein, 982 aa, Artificial Sequence
  Synthetic
QVQLVQSGAEVKKPGASVKVSCKASGYTFTNYWMNWVRQAPGQCLEWMGNIAYGVKGTNYNQKFQGRVTMTVDTSSSTAYMELSRLRSDDTAVYYCATRYFYVMDYWGQGTLVTVSSGGGGSGGGGSGGGGSDIQMTQSPSSLSASVGDRVTITCRASQDISNYLNWYQQKPGKVPKLLIYYTSRLHSGVPSRFSGSGSGTDFTLTISSLQPEDVATYYCVQYAQFPLTFGCGTKVEIKSGGGGSEVQLVESGGGLVQPGGSLKLSCAASGFTFNKYAMNWVRQAPGKGLEWVARIRSKYNNYATYYAEAVKGRFTISRDDSKNTVYLQMNNLKTEDTAVYYCVRNENIGTSYISYWAYWGQGTLVTVSSGGGGSGGGGSGGGGSQTVVTQEPSLTVSPGGTVTITCGSSTGAVTSGNYPNWVQQKPGQAPRGLIGGTKFLAPGTPARFSGSLSGGKAALTLSGVQPEDEAEYYCVLWYSNRWVFGSGTKLTVLGGGGDKTHTCPPCPAPELLGGPSVFLFPPKPKDTLMISRTPEVTCVVVDVSHEDPEVKFNWYVDGVEVHNAKTKPCEEQYGSTYRCVSVLTVLHQDWLNGKEYKCKVSNKALPAPIEKTISKAKGQPREPQVYTLPPSREEMTKNQVSLTCLVKGFYPSDIAVEWESNGQPENNYKTTPPVLDSDGSFFLYSKLTVDKSRWQQGNVFSCSVMHEALHNHYTQKSLSLSPGKGGGGSGGGGSGGGGSGGGGSGGGGSGGGGSDKTHTCPPCPAPELLGGPSVFLFPPKPKDTLMISRTPEVTCVVVDVSHEDPEVKFNWYVDGVEVHNAKTKPCEEQYGSTYRCVSVLTVLHQDWLNGKEYKCKVSNKALPAPIEKTISKAKGQPREPQVYTLPPSREEMTKNQVSLTCLVKGFYPSDIAVEWESNGQPENNYKTTPPVLDSDGSFFLYSKLTVDKSRWQQGNVFSCSVMHEALHNHYTQKSLSLSPGK

SEQ ID NO: 2242 - protein, 982 aa, Artificial Sequence
  Synthetic
QVQLVQSGAEVKKPGASVKVSCKASGYTFTNYWMNWVRQAPGQCLEWMGNIAYGVKGTNYNQKFQGRVTMTVDTSSSTAYMELSRLRSDDTAVYYCATRYFYVMDYWGQGTLVTVSSGGGGSGGGGSGGGGSDIQMTQSPSSLSASVGDRVTITCRASQDISNYLNWYQQKPGKVPKLLIYYTSRLHSGVPSRFSGSGSGTDFTLTISSLQPEDVATYYCVQYAQFPLTFGCGTKVEIKSGGGGSEVQLVESGGGLVQPGGSLKLSCAASGFTFNKYAMNWVRQAPGKGMEWVARIRSKYNNYATYYADAVKDRFTISRDDSKNTLYLQMNNLKTEDTAVYYCVRAGNFGSSYISYFAYWGQGTLVTVSSGGGGSGGGGSGGGGSQTVVTQEPSLTVSPGGTVTITCGSSTGAVTSGNYPNWIQKKPGQAPRGLIGGTKFLAPGTPARFSGSLEGGKAALTLSGVQPEDEAEYYCVLYYSNRWVFGSGTKLTVLGGGGDKTHTCPPCPAPELLGGPSVFLFPPKPKDTLMISRTPEVTCVVVDVSHEDPEVKFNWYVDGVEVHNAKTKPCEEQYGSTYRCVSVLTVLHQDWLNGKEYKCKVSNKALPAPIEKTISKAKGQPREPQVYTLPPSREEMTKNQVSLTCLVKGFYPSDIAVEWESNGQPENNYKTTPPVLDSDGSFFLYSKLTVDKSRWQQGNVFSCSVMHEALHNHYTQKSLSLSPGKGGGGSGGGGSGGGGSGGGGSGGGGSGGGGSDKTHTCPPCPAPELLGGPSVFLFPPKPKDTLMISRTPEVTCVVVDVSHEDPEVKFNWYVDGVEVHNAKTKPCEEQYGSTYRCVSVLTVLHQDWLNGKEYKCKVSNKALPAPIEKTISKAKGQPREPQVYTLPPSREEMTKNQVSLTCLVKGFYPSDIAVEWESNGQPENNYKTTPPVLDSDGSFFLYSKLTVDKSRWQQGNVFSCSVMHEALHNHYTQKSLSLSPGK

SEQ ID NO: 2243 - protein, 982 aa, Artificial Sequence
  Synthetic
QVQLVQSGAEVKKPGASVKVSCKASGYTFTNYWMNWVRQAPGQCLEWMGNIAYGVKGTNYNQKFQGRVTMTVDTSSSTAYMELSRLRSDDTAVYYCATRYFYVMDYWGQGTLVTVSSGGGGSGGGGSGGGGSDIQMTQSPSSLSASVGDRVTITCRASQDISNYLNWYQQKPGKVPKLLIYYTSRLHSGVPSRFSGSGSGTDFTLTISSLQPEDVATYYCVQYAQFPLTFGCGTKVEIKSGGGGSEVQLVESGGGLVQPGGSLKLSCAASGFTFNKYAMNWVRQAPGKGMEWVARIRSKYNNYATYYADAVKDRFTISRDDSKNTLYLQMNNLKTEDTAVYYCVRAGNFGTSYISYWAYWGQGTLVTVSSGGGGSGGGGSGGGGSQTVVTQEPSLTVSPGGTVTITCGSSTGAVTSGNYPNWVQKKPGQAPRGLIGGTKFLAPGTPARFSGSLSGGKAALTLSGVQPEDEAEYYCVLWYSNRWVFGSGTKLTVLGGGGDKTHTCPPCPAPELLGGPSVFLFPPKPKDTLMISRTPEVTCVVVDVSHEDPEVKFNWYVDGVEVHNAKTKPCEEQYGSTYRCVSVLTVLHQDWLNGKEYKCKVSNKALPAPIEKTISKAKGQPREPQVYTLPPSREEMTKNQVSLTCLVKGFYPSDIAVEWESNGQPENNYKTTPPVLDSDGSFFLYSKLTVDKSRWQQGNVFSCSVMHEALHNHYTQKSLSLSPGKGGGGSGGGGSGGGGSGGGGSGGGGSGGGGSDKTHTCPPCPAPELLGGPSVFLFPPKPKDTLMISRTPEVTCVVVDVSHEDPEVKFNWYVDGVEVHNAKTKPCEEQYGSTYRCVSVLTVLHQDWLNGKEYKCKVSNKALPAPIEKTISKAKGQPREPQVYTLPPSREEMTKNQVSLTCLVKGFYPSDIAVEWESNGQPENNYKTTPPVLDSDGSFFLYSKLTVDKSRWQQGNVFSCSVMHEALHNHYTQKSLSLSPGK

SEQ ID NO: 2244 - protein, 982 aa, Artificial Sequence
  Synthetic
QVQLVQSGAEVKKPGASVKVSCKASGYTFTNYWMNWVRQAPGQCLEWMGNIAYGVKGTNYNQKFQGRVTMTVDTSSSTAYMELSRLRSDDTAVYYCATRYFYVMDYWGQGTLVTVSSGGGGSGGGGSGGGGSDIQMTQSPSSLSASVGDRVTITCRASQDISNYLNWYQQKPGKVPKLLIYYTSRLHSGVPSRFSGSGSGTDFTLTISSLQPEDVATYYCVQYAQFPLTFGCGTKVEIKSGGGGSEVQLVESGGGLVQPGGSLKLSCAASGFTFNKYAINWVREAPGKGLEWVARIRSKYNNYATYYADAVKDRFTISRDDSKNTAYLQMNNLKTEDTAVYYCVRNANFGTSYISYFAYWGQGTLVTVSSGGGGSGGGGSGGGGSQTVVTQEPSLTVSPGGTVTLTCGSSTGAVTSGNYPNWVQKKPGQAPRGLIGGTKFLAPGTPARFSGSLLGGKAALTLSGVQPEDEAEYYCVLWYSNRWVFGSGTKLTVLGGGGDKTHTCPPCPAPELLGGPSVFLFPPKPKDTLMISRTPEVTCVVVDVSHEDPEVKFNWYVDGVEVHNAKTKPCEEQYGSTYRCVSVLTVLHQDWLNGKEYKCKVSNKALPAPIEKTISKAKGQPREPQVYTLPPSREEMTKNQVSLTCLVKGFYPSDIAVEWESNGQPENNYKTTPPVLDSDGSFFLYSKLTVDKSRWQQGNVFSCSVMHEALHNHYTQKSLSLSPGKGGGGSGGGGSGGGGSGGGGSGGGGSGGGGSDKTHTCPPCPAPELLGGPSVFLFPPKPKDTLMISRTPEVTCVVVDVSHEDPEVKFNWYVDGVEVHNAKTKPCEEQYGSTYRCVSVLTVLHQDWLNGKEYKCKVSNKALPAPIEKTISKAKGQPREPQVYTLPPSREEMTKNQVSLTCLVKGFYPSDIAVEWESNGQPENNYKTTPPVLDSDGSFFLYSKLTVDKSRWQQGNVFSCSVMHEALHNHYTQKSLSLSPGK

SEQ ID NO: 2245 - protein, 994 aa, Artificial Sequence
  Synthetic
EVQLLESGGGLVQPGGSLRLSCAASGFSFSSYPINWVRQAPGKGLEWVGVIWTGGGTNYASSVKGRFTISRDNSKNTVYLQMNSLRAEDTAVYYCAKSRGVYDFDGRGAMDYWGQGTLVTVSSGGGGSGGGGSGGGGSDIVMTQSPDSLAVSLGERATINCKSSQSLLYSSNQKNYFAWYQQKPGQPPKLLIYWASTRESGVPDRFSGSGSGTDFTLTISSLQAEDVAVYYCQQYYSYPYTFGQGTKLEIKSGGGGSEVQLVESGGGLVQPGGSLKLSCAASGFTFNKYAMNWVRQAPGKGLEWVARIRSKYNNYATYYADSVKDRFTISRDDSKNTAYLQMNNLKTEDTAVYYCVRHGNFGNSYISYWAYWGQGTLVTVSSGGGGSGGGGSGGGGSQTVVTQEPSLTVSPGGTVTLTCGSSTGAVTSGNYPNWVQQKPGQAPRGLIGGTKFLAPGTPARFSGSLLGGKAALTLSGVQPEDEAEYYCVLWYSNRWVFGGGTKLTVLGGGGDKTHTCPPCPAPELLGGPSVFLFPPKPKDTLMISRTPEVTCVVVDVSHEDPEVKFNWYVDGVEVHNAKTKPCEEQYGSTYRCVSVLTVLHQDWLNGKEYKCKVSNKALPAPIEKTISKAKGQPREPQVYTLPPSREEMTKNQVSLTCLVKGFYPSDIAVEWESNGQPENNYKTTPPVLDSDGSFFLYSKLTVDKSRWQQGNVFSCSVMHEALHNHYTQKSLSLSPGKGGGGSGGGGSGGGGSGGGGSGGGGSGGGGSDKTHTCPPCPAPELLGGPSVFLFPPKPKDTLMISRTPEVTCVVVDVSHEDPEVKFNWYVDGVEVHNAKTKPCEEQYGSTYRCVSVLTVLHQDWLNGKEYKCKVSNKALPAPIEKTISKAKGQPREPQVYTLPPSREEMTKNQVSLTCLVKGFYPSDIAVEWESNGQPENNYKTTPPVLDSDGSFFLYSKLTVDKSRWQQGNVFSCSVMHEALHNHYTQKSLSLSPGK

SEQ ID NO: 2246 - protein, 994 aa, Artificial Sequence
  Synthetic
EVQLLESGGGLVQPGGSLRLSCAASGFSFSSYPINWVRQAPGKGLEWVGVIWTGGGTNYASSVKGRFTISRDNSKNTVYLQMNSLRAEDTAVYYCAKSRGVYDFDGRGAMDYWGQGTLVTVSSGGGGSGGGGSGGGGSDIVMTQSPDSLAVSLGERATINCKSSQSLLYSSNQKNYFAWYQQKPGQPPKLLIYWASTRESGVPDRFSGSGSGTDFTLTISSLQAEDVAVYYCQQYYSYPYTFGQGTKLEIKSGGGGSEVQLVESGGGLVQPGGSLKLSCAASGFTFNKYAINWVRQAPGKGLEWVARIRSKYNNYATYYADAVKDRFTISRDDSKNTVYLQMNNLKTEDTAVYYCARAGNFGSSYISYWAYWGQGTLVTVSSGGGGSGGGGSGGGGSQTVVTQEPSLTVSPGGTVTITCGSSTGAVTSGNYPNWVQKKPGQAPRGLIGGTKFLAPGTPARFSGSLSGGKAALTLSGVQPEDEAEYYCVLWYSNRWVFGSGTKLTVLGGGGDKTHTCPPCPAPELLGGPSVFLFPPKPKDTLMISRTPEVTCVVVDVSHEDPEVKFNWYVDGVEVHNAKTKPCEEQYGSTYRCVSVLTVLHQDWLNGKEYKCKVSNKALPAPIEKTISKAKGQPREPQVYTLPPSREEMTKNQVSLTCLVKGFYPSDIAVEWESNGQPENNYKTTPPVLDSDGSFFLYSKLTVDKSRWQQGNVFSCSVMHEALHNHYTQKSLSLSPGKGGGGSGGGGSGGGGSGGGGSGGGGSGGGGSDKTHTCPPCPAPELLGGPSVFLFPPKPKDTLMISRTPEVTCVVVDVSHEDPEVKFNWYVDGVEVHNAKTKPCEEQYGSTYRCVSVLTVLHQDWLNGKEYKCKVSNKALPAPIEKTISKAKGQPREPQVYTLPPSREEMTKNQVSLTCLVKGFYPSDIAVEWESNGQPENNYKTTPPVLDSDGSFFLYSKLTVDKSRWQQGNVFSCSVMHEALHNHYTQKSLSLSPGK

SEQ ID NO: 2247 - protein, 994 aa, Artificial Sequence
  Synthetic
EVQLLESGGGLVQPGGSLRLSCAASGFSFSSYPINWVRQAPGKGLEWVGVIWTGGGTNYASSVKGRFTISRDNSKNTVYLQMNSLRAEDTAVYYCAKSRGVYDFDGRGAMDYWGQGTLVTVSSGGGGSGGGGSGGGGSDIVMTQSPDSLAVSLGERATINCKSSQSLLYSSNQKNYFAWYQQKPGQPPKLLIYWASTRESGVPDRFSGSGSGTDFTLTISSLQAEDVAVYYCQQYYSYPYTFGQGTKLEIKSGGGGSEVQLVESGGGLVQPGGSLKLSCAASGFTFNKYAMNWVRQAPGKGLEWVARIRSKYNNYATYYAEAVKGRFTISRDDSKNTVYLQMNNLKTEDTAVYYCVRNENIGTSYISYWAYWGQGTLVTVSSGGGGSGGGGSGGGGSQTVVTQEPSLTVSPGGTVTITCGSSTGAVTSGNYPNWVQQKPGQAPRGLIGGTKFLAPGTPARFSGSLSGGKAALTLSGVQPEDEAEYYCVLWYSNRWVFGSGTKLTVLGGGGDKTHTCPPCPAPELLGGPSVFLFPPKPKDTLMISRTPEVTCVVVDVSHEDPEVKFNWYVDGVEVHNAKTKPCEEQYGSTYRCVSVLTVLHQDWLNGKEYKCKVSNKALPAPIEKTISKAKGQPREPQVYTLPPSREEMTKNQVSLTCLVKGFYPSDIAVEWESNGQPENNYKTTPPVLDSDGSFFLYSKLTVDKSRWQQGNVFSCSVMHEALHNHYTQKSLSLSPGKGGGGSGGGGSGGGGSGGGGSGGGGSGGGGSDKTHTCPPCPAPELLGGPSVFLFPPKPKDTLMISRTPEVTCVVVDVSHEDPEVKFNWYVDGVEVHNAKTKPCEEQYGSTYRCVSVLTVLHQDWLNGKEYKCKVSNKALPAPIEKTISKAKGQPREPQVYTLPPSREEMTKNQVSLTCLVKGFYPSDIAVEWESNGQPENNYKTTPPVLDSDGSFFLYSKLTVDKSRWQQGNVFSCSVMHEALHNHYTQKSLSLSPGK

SEQ ID NO: 2248 - protein, 994 aa, Artificial Sequence
  Synthetic
EVQLLESGGGLVQPGGSLRLSCAASGFSFSSYPINWVRQAPGKGLEWVGVIWTGGGTNYASSVKGRFTISRDNSKNTVYLQMNSLRAEDTAVYYCAKSRGVYDFDGRGAMDYWGQGTLVTVSSGGGGSGGGGSGGGGSDIVMTQSPDSLAVSLGERATINCKSSQSLLYSSNQKNYFAWYQQKPGQPPKLLIYWASTRESGVPDRFSGSGSGTDFTLTISSLQAEDVAVYYCQQYYSYPYTFGQGTKLEIKSGGGGSEVQLVESGGGLVQPGGSLKLSCAASGFTFNKYAMNWVRQAPGKGMEWVARIRSKYNNYATYYADAVKDRFTISRDDSKNTLYLQMNNLKTEDTAVYYCVRAGNFGSSYISYFAYWGQGTLVTVSSGGGGSGGGGSGGGGSQTVVTQEPSLTVSPGGTVTITCGSSTGAVTSGNYPNWIQKKPGQAPRGLIGGTKFLAPGTPARFSGSLEGGKAALTLSGVQPEDEAEYYCVLYYSNRWVFGSGTKLTVLGGGGDKTHTCPPCPAPELLGGPSVFLFPPKPKDTLMISRTPEVTCVVVDVSHEDPEVKFNWYVDGVEVHNAKTKPCEEQYGSTYRCVSVLTVLHQDWLNGKEYKCKVSNKALPAPIEKTISKAKGQPREPQVYTLPPSREEMTKNQVSLTCLVKGFYPSDIAVEWESNGQPENNYKTTPPVLDSDGSFFLYSKLTVDKSRWQQGNVFSCSVMHEALHNHYTQKSLSLSPGKGGGGSGGGGSGGGGSGGGGSGGGGSGGGGSDKTHTCPPCPAPELLGGPSVFLFPPKPKDTLMISRTPEVTCVVVDVSHEDPEVKFNWYVDGVEVHNAKTKPCEEQYGSTYRCVSVLTVLHQDWLNGKEYKCKVSNKALPAPIEKTISKAKGQPREPQVYTLPPSREEMTKNQVSLTCLVKGFYPSDIAVEWESNGQPENNYKTTPPVLDSDGSFFLYSKLTVDKSRWQQGNVFSCSVMHEALHNHYTQKSLSLSPGK

SEQ ID NO: 2249 - protein, 994 aa, Artificial Sequence
  Synthetic
EVQLLESGGGLVQPGGSLRLSCAASGFSFSSYPINWVRQAPGKGLEWVGVIWTGGGTNYASSVKGRFTISRDNSKNTVYLQMNSLRAEDTAVYYCAKSRGVYDFDGRGAMDYWGQGTLVTVSSGGGGSGGGGSGGGGSDIVMTQSPDSLAVSLGERATINCKSSQSLLYSSNQKNYFAWYQQKPGQPPKLLIYWASTRESGVPDRFSGSGSGTDFTLTISSLQAEDVAVYYCQQYYSYPYTFGQGTKLEIKSGGGGSEVQLVESGGGLVQPGGSLKLSCAASGFTFNKYAMNWVRQAPGKGMEWVARIRSKYNNYATYYADAVKDRFTISRDDSKNTLYLQMNNLKTEDTAVYYCVRAGNFGTSYISYWAYWGQGTLVTVSSGGGGSGGGGSGGGGSQTVVTQEPSLTVSPGGTVTITCGSSTGAVTSGNYPNWVQKKPGQAPRGLIGGTKFLAPGTPARFSGSLSGGKAALTLSGVQPEDEAEYYCVLWYSNRWVFGSGTKLTVLGGGGDKTHTCPPCPAPELLGGPSVFLFPPKPKDTLMISRTPEVTCVVVDVSHEDPEVKFNWYVDGVEVHNAKTKPCEEQYGSTYRCVSVLTVLHQDWLNGKEYKCKVSNKALPAPIEKTISKAKGQPREPQVYTLPPSREEMTKNQVSLTCLVKGFYPSDIAVEWESNGQPENNYKTTPPVLDSDGSFFLYSKLTVDKSRWQQGNVFSCSVMHEALHNHYTQKSLSLSPGKGGGGSGGGGSGGGGSGGGGSGGGGSGGGGSDKTHTCPPCPAPELLGGPSVFLFPPKPKDTLMISRTPEVTCVVVDVSHEDPEVKFNWYVDGVEVHNAKTKPCEEQYGSTYRCVSVLTVLHQDWLNGKEYKCKVSNKALPAPIEKTISKAKGQPREPQVYTLPPSREEMTKNQVSLTCLVKGFYPSDIAVEWESNGQPENNYKTTPPVLDSDGSFFLYSKLTVDKSRWQQGNVFSCSVMHEALHNHYTQKSLSLSPGK

SEQ ID NO: 2250 - protein, 994 aa, Artificial Sequence
  Synthetic
EVQLLESGGGLVQPGGSLRLSCAASGFSFSSYPINWVRQAPGKGLEWVGVIWTGGGTNYASSVKGRFTISRDNSKNTVYLQMNSLRAEDTAVYYCAKSRGVYDFDGRGAMDYWGQGTLVTVSSGGGGSGGGGSGGGGSDIVMTQSPDSLAVSLGERATINCKSSQSLLYSSNQKNYFAWYQQKPGQPPKLLIYWASTRESGVPDRFSGSGSGTDFTLTISSLQAEDVAVYYCQQYYSYPYTFGQGTKLEIKSGGGGSEVQLVESGGGLVQPGGSLKLSCAASGFTFNKYAINWVREAPGKGLEWVARIRSKYNNYATYYADAVKDRFTISRDDSKNTAYLQMNNLKTEDTAVYYCVRNANFGTSYISYFAYWGQGTLVTVSSGGGGSGGGGSGGGGSQTVVTQEPSLTVSPGGTVTLTCGSSTGAVTSGNYPNWVQKKPGQAPRGLIGGTKFLAPGTPARFSGSLLGGKAALTLSGVQPEDEAEYYCVLWYSNRWVFGSGTKLTVLGGGGDKTHTCPPCPAPELLGGPSVFLFPPKPKDTLMISRTPEVTCVVVDVSHEDPEVKFNWYVDGVEVHNAKTKPCEEQYGSTYRCVSVLTVLHQDWLNGKEYKCKVSNKALPAPIEKTISKAKGQPREPQVYTLPPSREEMTKNQVSLTCLVKGFYPSDIAVEWESNGQPENNYKTTPPVLDSDGSFFLYSKLTVDKSRWQQGNVFSCSVMHEALHNHYTQKSLSLSPGKGGGGSGGGGSGGGGSGGGGSGGGGSGGGGSDKTHTCPPCPAPELLGGPSVFLFPPKPKDTLMISRTPEVTCVVVDVSHEDPEVKFNWYVDGVEVHNAKTKPCEEQYGSTYRCVSVLTVLHQDWLNGKEYKCKVSNKALPAPIEKTISKAKGQPREPQVYTLPPSREEMTKNQVSLTCLVKGFYPSDIAVEWESNGQPENNYKTTPPVLDSDGSFFLYSKLTVDKSRWQQGNVFSCSVMHEALHNHYTQKSLSLSPGK

SEQ ID NO: 2251 - protein, 981 aa, Artificial Sequence
  Synthetic
EVQLLESGGGLVQPGGSLRLSCAASGFTFSSYWMHWVRQTPGKCLEWVSKIDPSDDYTNYNQKVKGRFTISIDKSKNTLYLQMNSLRAEDTAVYYCARWDYSHFDVWGQGTTVTVSSGGGGSGGGGSGGGGSEIVMTQSPATLSVSPGERATLTCRASSSVSYMHWYQQKPGQAPRLLIYGTSNLVSGVPARFSGSGSGTEFTLTISSLQSEDFAVYYCQQWSSYPLTFGCGTKVEIKSGGGGSEVQLVESGGGLVQPGGSLKLSCAASGFTFNKYAMNWVRQAPGKGLEWVARIRSKYNNYATYYADSVKDRFTISRDDSKNTAYLQMNNLKTEDTAVYYCVRHGNFGNSYISYWAYWGQGTLVTVSSGGGGSGGGGSGGGGSQTVVTQEPSLTVSPGGTVTLTCGSSTGAVTSGNYPNWVQQKPGQAPRGLIGGTKFLAPGTPARFSGSLLGGKAALTLSGVQPEDEAEYYCVLWYSNRWVFGGGTKLTVLGGGGDKTHTCPPCPAPELLGGPSVFLFPPKPKDTLMISRTPEVTCVVVDVSHEDPEVKFNWYVDGVEVHNAKTKPCEEQYGSTYRCVSVLTVLHQDWLNGKEYKCKVSNKALPAPIEKTISKAKGQPREPQVYTLPPSREEMTKNQVSLTCLVKGFYPSDIAVEWESNGQPENNYKTTPPVLDSDGSFFLYSKLTVDKSRWQQGNVFSCSVMHEALHNHYTQKSLSLSPGKGGGGSGGGGSGGGGSGGGGSGGGGSGGGGSDKTHTCPPCPAPELLGGPSVFLFPPKPKDTLMISRTPEVTCVVVDVSHEDPEVKFNWYVDGVEVHNAKTKPCEEQYGSTYRCVSVLTVLHQDWLNGKEYKCKVSNKALPAPIEKTISKAKGQPREPQVYTLPPSREEMTKNQVSLTCLVKGFYPSDIAVEWESNGQPENNYKTTPPVLDSDGSFFLYSKLTVDKSRWQQGNVFSCSVMHEALHNHYTQKSLSLSPGK

SEQ ID NO: 2252 - protein, 981 aa, Artificial Sequence
  Synthetic
EVQLLESGGGLVQPGGSLRLSCAASGFTFSSYWMHWVRQTPGKCLEWVSKIDPSDDYTNYNQKVKGRFTISIDKSKNTLYLQMNSLRAEDTAVYYCARWDYSHFDVWGQGTTVTVSSGGGGSGGGGSGGGGSEIVMTQSPATLSVSPGERATLTCRASSSVSYMHWYQQKPGQAPRLLIYGTSNLVSGVPARFSGSGSGTEFTLTISSLQSEDFAVYYCQQWSSYPLTFGCGTKVEIKSGGGGSEVQLVESGGGLVQPGGSLKLSCAASGFTFNKYAINWVRQAPGKGLEWVARIRSKYNNYATYYADAVKDRFTISRDDSKNTVYLQMNNLKTEDTAVYYCARAGNFGSSYISYWAYWGQGTLVTVSSGGGGSGGGGSGGGGSQTVVTQEPSLTVSPGGTVTITCGSSTGAVTSGNYPNWVQKKPGQAPRGLIGGTKFLAPGTPARFSGSLSGGKAALTLSGVQPEDEAEYYCVLWYSNRWVFGSGTKLTVLGGGGDKTHTCPPCPAPELLGGPSVFLFPPKPKDTLMISRTPEVTCVVVDVSHEDPEVKFNWYVDGVEVHNAKTKPCEEQYGSTYRCVSVLTVLHQDWLNGKEYKCKVSNKALPAPIEKTISKAKGQPREPQVYTLPPSREEMTKNQVSLTCLVKGFYPSDIAVEWESNGQPENNYKTTPPVLDSDGSFFLYSKLTVDKSRWQQGNVFSCSVMHEALHNHYTQKSLSLSPGKGGGGSGGGGSGGGGSGGGGSGGGGSGGGGSDKTHTCPPCPAPELLGGPSVFLFPPKPKDTLMISRTPEVTCVVVDVSHEDPEVKFNWYVDGVEVHNAKTKPCEEQYGSTYRCVSVLTVLHQDWLNGKEYKCKVSNKALPAPIEKTISKAKGQPREPQVYTLPPSREEMTKNQVSLTCLVKGFYPSDIAVEWESNGQPENNYKTTPPVLDSDGSFFLYSKLTVDKSRWQQGNVFSCSVMHEALHNHYTQKSLSLSPGK

SEQ ID NO: 2253 - protein, 981 aa, Artificial Sequence
  Synthetic
EVQLLESGGGLVQPGGSLRLSCAASGFTFSSYWMHWVRQTPGKCLEWVSKIDPSDDYTNYNQKVKGRFTISIDKSKNTLYLQMNSLRAEDTAVYYCARWDYSHFDVWGQGTTVTVSSGGGGSGGGGSGGGGSEIVMTQSPATLSVSPGERATLTCRASSSVSYMHWYQQKPGQAPRLLIYGTSNLVSGVPARFSGSGSGTEFTLTISSLQSEDFAVYYCQQWSSYPLTFGCGTKVEIKSGGGGSEVQLVESGGGLVQPGGSLKLSCAASGFTFNKYAMNWVRQAPGKGLEWVARIRSKYNNYATYYAEAVKGRFTISRDDSKNTVYLQMNNLKTEDTAVYYCVRNENIGTSYISYWAYWGQGTLVTVSSGGGGSGGGGSGGGGSQTVVTQEPSLTVSPGGTVTITCGSSTGAVTSGNYPNWVQQKPGQAPRGLIGGTKFLAPGTPARFSGSLSGGKAALTLSGVQPEDEAEYYCVLWYSNRWVFGSGTKLTVLGGGGDKTHTCPPCPAPELLGGPSVFLFPPKPKDTLMISRTPEVTCVVVDVSHEDPEVKFNWYVDGVEVHNAKTKPCEEQYGSTYRCVSVLTVLHQDWLNGKEYKCKVSNKALPAPIEKTISKAKGQPREPQVYTLPPSREEMTKNQVSLTCLVKGFYPSDIAVEWESNGQPENNYKTTPPVLDSDGSFFLYSKLTVDKSRWQQGNVFSCSVMHEALHNHYTQKSLSLSPGKGGGGSGGGGSGGGGSGGGGSGGGGSGGGGSDKTHTCPPCPAPELLGGPSVFLFPPKPKDTLMISRTPEVTCVVVDVSHEDPEVKFNWYVDGVEVHNAKTKPCEEQYGSTYRCVSVLTVLHQDWLNGKEYKCKVSNKALPAPIEKTISKAKGQPREPQVYTLPPSREEMTKNQVSLTCLVKGFYPSDIAVEWESNGQPENNYKTTPPVLDSDGSFFLYSKLTVDKSRWQQGNVFSCSVMHEALHNHYTQKSLSLSPGK

SEQ ID NO: 2254 - protein, 981 aa, Artificial Sequence
  Synthetic
EVQLLESGGGLVQPGGSLRLSCAASGFTFSSYWMHWVRQTPGKCLEWVSKIDPSDDYTNYNQKVKGRFTISIDKSKNTLYLQMNSLRAEDTAVYYCARWDYSHFDVWGQGTTVTVSSGGGGSGGGGSGGGGSEIVMTQSPATLSVSPGERATLTCRASSSVSYMHWYQQKPGQAPRLLIYGTSNLVSGVPARFSGSGSGTEFTLTISSLQSEDFAVYYCQQWSSYPLTFGCGTKVEIKSGGGGSEVQLVESGGGLVQPGGSLKLSCAASGFTFNKYAMNWVRQAPGKGMEWVARIRSKYNNYATYYADAVKDRFTISRDDSKNTLYLQMNNLKTEDTAVYYCVRAGNFGSSYISYFAYWGQGTLVTVSSGGGGSGGGGSGGGGSQTVVTQEPSLTVSPGGTVTITCGSSTGAVTSGNYPNWIQKKPGQAPRGLIGGTKFLAPGTPARFSGSLEGGKAALTLSGVQPEDEAEYYCVLYYSNRWVFGSGTKLTVLGGGGDKTHTCPPCPAPELLGGPSVFLFPPKPKDTLMISRTPEVTCVVVDVSHEDPEVKFNWYVDGVEVHNAKTKPCEEQYGSTYRCVSVLTVLHQDWLNGKEYKCKVSNKALPAPIEKTISKAKGQPREPQVYTLPPSREEMTKNQVSLTCLVKGFYPSDIAVEWESNGQPENNYKTTPPVLDSDGSFFLYSKLTVDKSRWQQGNVFSCSVMHEALHNHYTQKSLSLSPGKGGGGSGGGGSGGGGSGGGGSGGGGSGGGGSDKTHTCPPCPAPELLGGPSVFLFPPKPKDTLMISRTPEVTCVVVDVSHEDPEVKFNWYVDGVEVHNAKTKPCEEQYGSTYRCVSVLTVLHQDWLNGKEYKCKVSNKALPAPIEKTISKAKGQPREPQVYTLPPSREEMTKNQVSLTCLVKGFYPSDIAVEWESNGQPENNYKTTPPVLDSDGSFFLYSKLTVDKSRWQQGNVFSCSVMHEALHNHYTQKSLSLSPGK

SEQ ID NO: 2255 - protein, 981 aa, Artificial Sequence
  Synthetic
EVQLLESGGGLVQPGGSLRLSCAASGFTFSSYWMHWVRQTPGKCLEWVSKIDPSDDYTNYNQKVKGRFTISIDKSKNTLYLQMNSLRAEDTAVYYCARWDYSHFDVWGQGTTVTVSSGGGGSGGGGSGGGGSEIVMTQSPATLSVSPGERATLTCRASSSVSYMHWYQQKPGQAPRLLIYGTSNLVSGVPARFSGSGSGTEFTLTISSLQSEDFAVYYCQQWSSYPLTFGCGTKVEIKSGGGGSEVQLVESGGGLVQPGGSLKLSCAASGFTFNKYAMNWVRQAPGKGMEWVARIRSKYNNYATYYADAVKDRFTISRDDSKNTLYLQMNNLKTEDTAVYYCVRAGNFGTSYISYWAYWGQGTLVTVSSGGGGSGGGGSGGGGSQTVVTQEPSLTVSPGGTVTITCGSSTGAVTSGNYPNWVQKKPGQAPRGLIGGTKFLAPGTPARFSGSLSGGKAALTLSGVQPEDEAEYYCVLWYSNRWVFGSGTKLTVLGGGGDKTHTCPPCPAPELLGGPSVFLFPPKPKDTLMISRTPEVTCVVVDVSHEDPEVKFNWYVDGVEVHNAKTKPCEEQYGSTYRCVSVLTVLHQDWLNGKEYKCKVSNKALPAPIEKTISKAKGQPREPQVYTLPPSREEMTKNQVSLTCLVKGFYPSDIAVEWESNGQPENNYKTTPPVLDSDGSFFLYSKLTVDKSRWQQGNVFSCSVMHEALHNHYTQKSLSLSPGKGGGGSGGGGSGGGGSGGGGSGGGGSGGGGSDKTHTCPPCPAPELLGGPSVFLFPPKPKDTLMISRTPEVTCVVVDVSHEDPEVKFNWYVDGVEVHNAKTKPCEEQYGSTYRCVSVLTVLHQDWLNGKEYKCKVSNKALPAPIEKTISKAKGQPREPQVYTLPPSREEMTKNQVSLTCLVKGFYPSDIAVEWESNGQPENNYKTTPPVLDSDGSFFLYSKLTVDKSRWQQGNVFSCSVMHEALHNHYTQKSLSLSPGK

SEQ ID NO: 2256 - protein, 981 aa, Artificial Sequence
  Synthetic
EVQLLESGGGLVQPGGSLRLSCAASGFTFSSYWMHWVRQTPGKCLEWVSKIDPSDDYTNYNQKVKGRFTISIDKSKNTLYLQMNSLRAEDTAVYYCARWDYSHFDVWGQGTTVTVSSGGGGSGGGGSGGGGSEIVMTQSPATLSVSPGERATLTCRASSSVSYMHWYQQKPGQAPRLLIYGTSNLVSGVPARFSGSGSGTEFTLTISSLQSEDFAVYYCQQWSSYPLTFGCGTKVEIKSGGGGSEVQLVESGGGLVQPGGSLKLSCAASGFTFNKYAINWVREAPGKGLEWVARIRSKYNNYATYYADAVKDRFTISRDDSKNTAYLQMNNLKTEDTAVYYCVRNANFGTSYISYFAYWGQGTLVTVSSGGGGSGGGGSGGGGSQTVVTQEPSLTVSPGGTVTLTCGSSTGAVTSGNYPNWVQKKPGQAPRGLIGGTKFLAPGTPARFSGSLLGGKAALTLSGVQPEDEAEYYCVLWYSNRWVFGSGTKLTVLGGGGDKTHTCPPCPAPELLGGPSVFLFPPKPKDTLMISRTPEVTCVVVDVSHEDPEVKFNWYVDGVEVHNAKTKPCEEQYGSTYRCVSVLTVLHQDWLNGKEYKCKVSNKALPAPIEKTISKAKGQPREPQVYTLPPSREEMTKNQVSLTCLVKGFYPSDIAVEWESNGQPENNYKTTPPVLDSDGSFFLYSKLTVDKSRWQQGNVFSCSVMHEALHNHYTQKSLSLSPGKGGGGSGGGGSGGGGSGGGGSGGGGSGGGGSDKTHTCPPCPAPELLGGPSVFLFPPKPKDTLMISRTPEVTCVVVDVSHEDPEVKFNWYVDGVEVHNAKTKPCEEQYGSTYRCVSVLTVLHQDWLNGKEYKCKVSNKALPAPIEKTISKAKGQPREPQVYTLPPSREEMTKNQVSLTCLVKGFYPSDIAVEWESNGQPENNYKTTPPVLDSDGSFFLYSKLTVDKSRWQQGNVFSCSVMHEALHNHYTQKSLSLSPGK

SEQ ID NO: 2257 - protein, 5 aa, Artificial Sequence
  Synthetic
NYYMH

SEQ ID NO: 2258 - protein, 17 aa, Artificial Sequence
  Synthetic
WINPTSGGANYAQKFQG

SEQ ID NO: 2259 - protein, 13 aa, Artificial Sequence
  Synthetic
ESHAIQEGIWFDY

SEQ ID NO: 2260 - protein, 11 aa, Artificial Sequence
  Synthetic
RASQSISNYLN

SEQ ID NO: 2261 - protein, 7 aa, Artificial Sequence
  Synthetic
DASSLQS

SEQ ID NO: 2262 - protein, 9 aa, Artificial Sequence
  Synthetic
QQSYSFPLT

SEQ ID NO: 2263 - protein, 122 aa, Artificial Sequence
  Synthetic
QVQLVQSGAEVKKPGASVKVSCKASGYTFTNYYMHWVRQAPGQCLEWMGWINPTSGGANYAQKFQGRVTMTRDTSISTAYMELSRLRSDDTAVYFCARESHAIQEGIWFDYWGQGTLVTVSS

SEQ ID NO: 2264 - protein, 107 aa, Artificial Sequence
  Synthetic
DIQMTQSPSSLSASVGDRVTISCRASQSISNYLNWYQQKPGKAPKLLIYDASSLQSGVPSRFSGSGSGTDFTLTISSLQPEDFATYYCQQSYSFPLTFGCGTKVEIK

SEQ ID NO: 2265 - protein, 107 aa, Artificial Sequence
  Synthetic
EIQMTQSPSSLSASVGDRVTISCRASQSISNYLNWYQQKPGKAPKLLIYDASSLQSGVPSRFSGSGSGTDFTLTISSLQPEDFATYYCQQSYSFPLTFGCGTKVEIK

SEQ ID NO: 2266 - protein, 987 aa, Artificial Sequence
  Synthetic
QVQLVQSGAEVKKPGASVKVSCKASGYTFTNYYMHWVRQAPGQCLEWMGWINPTSGGANYAQKFQGRVTMTRDTSISTAYMELSRLRSDDTAVYFCARESHAIQEGIWFDYWGQGTLVTVSSGGGGSGGGGSGGGGSDIQMTQSPSSLSASVGDRVTISCRASQSISNYLNWYQQKPGKAPKLLIYDASSLQSGVPSRFSGSGSGTDFTLTISSLQPEDFATYYCQQSYSFPLTFGCGTKVEIKSGGGGSEVQLVESGGGLVQPGGSLKLSCAASGFTFNKYAMNWVRQAPGKGLEWVARIRSKYNNYATYYADSVKDRFTISRDDSKNTAYLQMNNLKTEDTAVYYCVRHGNFGNSYISYWAYWGQGTLVTVSSGGGGSGGGGSGGGGSQTVVTQEPSLTVSPGGTVTLTCGSSTGAVTSGNYPNWVQQKPGQAPRGLIGGTKFLAPGTPARFSGSLLGGKAALTLSGVQPEDEAEYYCVLWYSNRWVFGGGTKLTVLGGGGDKTHTCPPCPAPELLGGPSVFLFPPKPKDTLMISRTPEVTCVVVDVSHEDPEVKFNWYVDGVEVHNAKTKPCEEQYGSTYRCVSVLTVLHQDWLNGKEYKCKVSNKALPAPIEKTISKAKGQPREPQVYTLPPSREEMTKNQVSLTCLVKGFYPSDIAVEWESNGQPENNYKTTPPVLDSDGSFFLYSKLTVDKSRWQQGNVFSCSVMHEALHNHYTQKSLSLSPGKGGGGSGGGGSGGGGSGGGGSGGGGSGGGGSDKTHTCPPCPAPELLGGPSVFLFPPKPKDTLMISRTPEVTCVVVDVSHEDPEVKFNWYVDGVEVHNAKTKPCEEQYGSTYRCVSVLTVLHQDWLNGKEYKCKVSNKALPAPIEKTISKAKGQPREPQVYTLPPSREEMTKNQVSLTCLVKGFYPSDIAVEWESNGQPENNYKTTPPVLDSDGSFFLYSKLTVDKSRWQQGNVFSCSVMHEALHNHYTQKSLSLSPGK

SEQ ID NO: 2267 - protein, 987 aa, Artificial Sequence
  Synthetic
QVQLVQSGAEVKKPGASVKVSCKASGYTFTNYYMHWVRQAPGQCLEWMGWINPTSGGANYAQKFQGRVTMTRDTSISTAYMELSRLRSDDTAVYFCARESHAIQEGIWFDYWGQGTLVTVSSGGGGSGGGGSGGGGSDIQMTQSPSSLSASVGDRVTISCRASQSISNYLNWYQQKPGKAPKLLIYDASSLQSGVPSRFSGSGSGTDFTLTISSLQPEDFATYYCQQSYSFPLTFGCGTKVEIKSGGGGSEVQLVESGGGLVQPGGSLKLSCAASGFTFNKYAINWVRQAPGKGLEWVARIRSKYNNYATYYADAVKDRFTISRDDSKNTVYLQMNNLKTEDTAVYYCARAGNFGSSYISYWAYWGQGTLVTVSSGGGGSGGGGSGGGGSQTVVTQEPSLTVSPGGTVTITCGSSTGAVTSGNYPNWVQKKPGQAPRGLIGGTKFLAPGTPARFSGSLSGGKAALTLSGVQPEDEAEYYCVLWYSNRWVFGSGTKLTVLGGGGDKTHTCPPCPAPELLGGPSVFLFPPKPKDTLMISRTPEVTCVVVDVSHEDPEVKFNWYVDGVEVHNAKTKPCEEQYGSTYRCVSVLTVLHQDWLNGKEYKCKVSNKALPAPIEKTISKAKGQPREPQVYTLPPSREEMTKNQVSLTCLVKGFYPSDIAVEWESNGQPENNYKTTPPVLDSDGSFFLYSKLTVDKSRWQQGNVFSCSVMHEALHNHYTQKSLSLSPGKGGGGSGGGGSGGGGSGGGGSGGGGSGGGGSDKTHTCPPCPAPELLGGPSVFLFPPKPKDTLMISRTPEVTCVVVDVSHEDPEVKFNWYVDGVEVHNAKTKPCEEQYGSTYRCVSVLTVLHQDWLNGKEYKCKVSNKALPAPIEKTISKAKGQPREPQVYTLPPSREEMTKNQVSLTCLVKGFYPSDIAVEWESNGQPENNYKTTPPVLDSDGSFFLYSKLTVDKSRWQQGNVFSCSVMHEALHNHYTQKSLSLSPGK

SEQ ID NO: 2268 - protein, 987 aa, Artificial Sequence
  Synthetic
QVQLVQSGAEVKKPGASVKVSCKASGYTFTNYYMHWVRQAPGQCLEWMGWINPTSGGANYAQKFQGRVTMTRDTSISTAYMELSRLRSDDTAVYFCARESHAIQEGIWFDYWGQGTLVTVSSGGGGSGGGGSGGGGSDIQMTQSPSSLSASVGDRVTISCRASQSISNYLNWYQQKPGKAPKLLIYDASSLQSGVPSRFSGSGSGTDFTLTISSLQPEDFATYYCQQSYSFPLTFGCGTKVEIKSGGGGSEVQLVESGGGLVQPGGSLKLSCAASGFTFNKYAMNWVRQAPGKGLEWVARIRSKYNNYATYYAEAVKGRFTISRDDSKNTVYLQMNNLKTEDTAVYYCVRNENIGTSYISYWAYWGQGTLVTVSSGGGGSGGGGSGGGGSQTVVTQEPSLTVSPGGTVTITCGSSTGAVTSGNYPNWVQQKPGQAPRGLIGGTKFLAPGTPARFSGSLSGGKAALTLSGVQPEDEAEYYCVLWYSNRWVFGSGTKLTVLGGGGDKTHTCPPCPAPELLGGPSVFLFPPKPKDTLMISRTPEVTCVVVDVSHEDPEVKFNWYVDGVEVHNAKTKPCEEQYGSTYRCVSVLTVLHQDWLNGKEYKCKVSNKALPAPIEKTISKAKGQPREPQVYTLPPSREEMTKNQVSLTCLVKGFYPSDIAVEWESNGQPENNYKTTPPVLDSDGSFFLYSKLTVDKSRWQQGNVFSCSVMHEALHNHYTQKSLSLSPGKGGGGSGGGGSGGGGSGGGGSGGGGSGGGGSDKTHTCPPCPAPELLGGPSVFLFPPKPKDTLMISRTPEVTCVVVDVSHEDPEVKFNWYVDGVEVHNAKTKPCEEQYGSTYRCVSVLTVLHQDWLNGKEYKCKVSNKALPAPIEKTISKAKGQPREPQVYTLPPSREEMTKNQVSLTCLVKGFYPSDIAVEWESNGQPENNYKTTPPVLDSDGSFFLYSKLTVDKSRWQQGNVFSCSVMHEALHNHYTQKSLSLSPGK

SEQ ID NO: 2269 - protein, 987 aa, Artificial Sequence
  Synthetic
QVQLVQSGAEVKKPGASVKVSCKASGYTFTNYYMHWVRQAPGQCLEWMGWINPTSGGANYAQKFQGRVTMTRDTSISTAYMELSRLRSDDTAVYFCARESHAIQEGIWFDYWGQGTLVTVSSGGGGSGGGGSGGGGSDIQMTQSPSSLSASVGDRVTISCRASQSISNYLNWYQQKPGKAPKLLIYDASSLQSGVPSRFSGSGSGTDFTLTISSLQPEDFATYYCQQSYSFPLTFGCGTKVEIKSGGGGSEVQLVESGGGLVQPGGSLKLSCAASGFTFNKYAMNWVRQAPGKGMEWVARIRSKYNNYATYYADAVKDRFTISRDDSKNTLYLQMNNLKTEDTAVYYCVRAGNFGSSYISYFAYWGQGTLVTVSSGGGGSGGGGSGGGGSQTVVTQEPSLTVSPGGTVTITCGSSTGAVTSGNYPNWIQKKPGQAPRGLIGGTKFLAPGTPARFSGSLEGGKAALTLSGVQPEDEAEYYCVLYYSNRWVFGSGTKLTVLGGGGDKTHTCPPCPAPELLGGPSVFLFPPKPKDTLMISRTPEVTCVVVDVSHEDPEVKFNWYVDGVEVHNAKTKPCEEQYGSTYRCVSVLTVLHQDWLNGKEYKCKVSNKALPAPIEKTISKAKGQPREPQVYTLPPSREEMTKNQVSLTCLVKGFYPSDIAVEWESNGQPENNYKTTPPVLDSDGSFFLYSKLTVDKSRWQQGNVFSCSVMHEALHNHYTQKSLSLSPGKGGGGSGGGGSGGGGSGGGGSGGGGSGGGGSDKTHTCPPCPAPELLGGPSVFLFPPKPKDTLMISRTPEVTCVVVDVSHEDPEVKFNWYVDGVEVHNAKTKPCEEQYGSTYRCVSVLTVLHQDWLNGKEYKCKVSNKALPAPIEKTISKAKGQPREPQVYTLPPSREEMTKNQVSLTCLVKGFYPSDIAVEWESNGQPENNYKTTPPVLDSDGSFFLYSKLTVDKSRWQQGNVFSCSVMHEALHNHYTQKSLSLSPGK

SEQ ID NO: 2270 - protein, 987 aa, Artificial Sequence
  Synthetic
QVQLVQSGAEVKKPGASVKVSCKASGYTFTNYYMHWVRQAPGQCLEWMGWINPTSGGANYAQKFQGRVTMTRDTSISTAYMELSRLRSDDTAVYFCARESHAIQEGIWFDYWGQGTLVTVSSGGGGSGGGGSGGGGSDIQMTQSPSSLSASVGDRVTISCRASQSISNYLNWYQQKPGKAPKLLIYDASSLQSGVPSRFSGSGSGTDFTLTISSLQPEDFATYYCQQSYSFPLTFGCGTKVEIKSGGGGSEVQLVESGGGLVQPGGSLKLSCAASGFTFNKYAINWVREAPGKGLEWVARIRSKYNNYATYYADAVKDRFTISRDDSKNTAYLQMNNLKTEDTAVYYCVRNANFGTSYISYFAYWGQGTLVTVSSGGGGSGGGGSGGGGSQTVVTQEPSLTVSPGGTVTLTCGSSTGAVTSGNYPNWVQKKPGQAPRGLIGGTKFLAPGTPARFSGSLLGGKAALTLSGVQPEDEAEYYCVLWYSNRWVFGSGTKLTVLGGGGDKTHTCPPCPAPELLGGPSVFLFPPKPKDTLMISRTPEVTCVVVDVSHEDPEVKFNWYVDGVEVHNAKTKPCEEQYGSTYRCVSVLTVLHQDWLNGKEYKCKVSNKALPAPIEKTISKAKGQPREPQVYTLPPSREEMTKNQVSLTCLVKGFYPSDIAVEWESNGQPENNYKTTPPVLDSDGSFFLYSKLTVDKSRWQQGNVFSCSVMHEALHNHYTQKSLSLSPGKGGGGSGGGGSGGGGSGGGGSGGGGSGGGGSDKTHTCPPCPAPELLGGPSVFLFPPKPKDTLMISRTPEVTCVVVDVSHEDPEVKFNWYVDGVEVHNAKTKPCEEQYGSTYRCVSVLTVLHQDWLNGKEYKCKVSNKALPAPIEKTISKAKGQPREPQVYTLPPSREEMTKNQVSLTCLVKGFYPSDIAVEWESNGQPENNYKTTPPVLDSDGSFFLYSKLTVDKSRWQQGNVFSCSVMHEALHNHYTQKSLSLSPGK

SEQ ID NO: 2271 - protein, 987 aa, Artificial Sequence
  Synthetic
QVQLVQSGAEVKKPGASVKVSCKASGYTFTNYYMHWVRQAPGQCLEWMGWINPTSGGANYAQKFQGRVTMTRDTSISTAYMELSRLRSDDTAVYFCARESHAIQEGIWFDYWGQGTLVTVSSGGGGSGGGGSGGGGSDIQMTQSPSSLSASVGDRVTISCRASQSISNYLNWYQQKPGKAPKLLIYDASSLQSGVPSRFSGSGSGTDFTLTISSLQPEDFATYYCQQSYSFPLTFGCGTKVEIKSGGGGSEVQLVESGGGLVQPGGSLKLSCAASGFTFNKYAMNWVRQAPGKGMEWVARIRSKYNNYATYYADAVKDRFTISRDDSKNTLYLQMNNLKTEDTAVYYCVRAGNFGTSYISYWAYWGQGTLVTVSSGGGGSGGGGSGGGGSQTVVTQEPSLTVSPGGTVTITCGSSTGAVTSGNYPNWVQKKPGQAPRGLIGGTKFLAPGTPARFSGSLSGGKAALTLSGVQPEDEAEYYCVLWYSNRWVFGSGTKLTVLGGGGDKTHTCPPCPAPELLGGPSVFLFPPKPKDTLMISRTPEVTCVVVDVSHEDPEVKFNWYVDGVEVHNAKTKPCEEQYGSTYRCVSVLTVLHQDWLNGKEYKCKVSNKALPAPIEKTISKAKGQPREPQVYTLPPSREEMTKNQVSLTCLVKGFYPSDIAVEWESNGQPENNYKTTPPVLDSDGSFFLYSKLTVDKSRWQQGNVFSCSVMHEALHNHYTQKSLSLSPGKGGGGSGGGGSGGGGSGGGGSGGGGSGGGGSDKTHTCPPCPAPELLGGPSVFLFPPKPKDTLMISRTPEVTCVVVDVSHEDPEVKFNWYVDGVEVHNAKTKPCEEQYGSTYRCVSVLTVLHQDWLNGKEYKCKVSNKALPAPIEKTISKAKGQPREPQVYTLPPSREEMTKNQVSLTCLVKGFYPSDIAVEWESNGQPENNYKTTPPVLDSDGSFFLYSKLTVDKSRWQQGNVFSCSVMHEALHNHYTQKSLSLSPGK

SEQ ID NO: 2272 - protein, 5 aa, Artificial Sequence
  Synthetic
SSWMN

SEQ ID NO: 2273 - protein, 17 aa, Artificial Sequence
  Synthetic
RIYPGDADAKYNAKFKG

SEQ ID NO: 2274 - protein, 11 aa, Artificial Sequence
  Synthetic
STMIATGAMDY

SEQ ID NO: 2275 - protein, 11 aa, Artificial Sequence
  Synthetic
KASQDVSTAVA

SEQ ID NO: 2276 - protein, 7 aa, Artificial Sequence
  Synthetic
SASYRYT

SEQ ID NO: 2277 - protein, 10 aa, Artificial Sequence
  Synthetic
QQHYSTPPYT

SEQ ID NO: 2278 - protein, 120 aa, Artificial Sequence
  Synthetic
QVQLVQSGAEVKKPGASVKVSCKASGYAFSSSWMNWVRQAPGQCLEWIGRIYPGDADAKYNAKFKGKATLTADKSTSTAYMELSSLRSEDTAVYYCARSTMIATGAMDYWGQGTLVTVSS

SEQ ID NO: 2279 - protein, 109 aa, Artificial Sequence
  Synthetic
DIQMTQSPSSLSASVGDRVTITCKASQDVSTAVAWYQQKPGKAPKLLIYSASYRYTGVPDRFTGSGSGTDFTLTISSLQPEDFATYYCQQHYSTPPYTFGCGTKVEIKR

SEQ ID NO: 2280 - protein, 987 aa, Artificial Sequence
  Synthetic
DIQMTQSPSSLSASVGDRVTITCKASQDVSTAVAWYQQKPGKAPKLLIYSASYRYTGVPDRFTGSGSGTDFTLTISSLQPEDFATYYCQQHYSTPPYTFGCGTKVEIKRGGGGSGGGGSGGGGSQVQLVQSGAEVKKPGASVKVSCKASGYAFSSSWMNWVRQAPGQCLEWIGRIYPGDADAKYNAKFKGKATLTADKSTSTAYMELSSLRSEDTAVYYCARSTMIATGAMDYWGQGTLVTVSSSGGGGSEVQLVESGGGLVQPGGSLKLSCAASGFTFNKYAMNWVRQAPGKGLEWVARIRSKYNNYATYYADSVKDRFTISRDDSKNTAYLQMNNLKTEDTAVYYCVRHGNFGNSYISYWAYWGQGTLVTVSSGGGGSGGGGSGGGGSQTVVTQEPSLTVSPGGTVTLTCGSSTGAVTSGNYPNWVQQKPGQAPRGLIGGTKFLAPGTPARFSGSLLGGKAALTLSGVQPEDEAEYYCVLWYSNRWVFGGGTKLTVLGGGGDKTHTCPPCPAPELLGGPSVFLFPPKPKDTLMISRTPEVTCVVVDVSHEDPEVKFNWYVDGVEVHNAKTKPCEEQYGSTYRCVSVLTVLHQDWLNGKEYKCKVSNKALPAPIEKTISKAKGQPREPQVYTLPPSREEMTKNQVSLTCLVKGFYPSDIAVEWESNGQPENNYKTTPPVLDSDGSFFLYSKLTVDKSRWQQGNVFSCSVMHEALHNHYTQKSLSLSPGKGGGGSGGGGSGGGGSGGGGSGGGGSGGGGSDKTHTCPPCPAPELLGGPSVFLFPPKPKDTLMISRTPEVTCVVVDVSHEDPEVKFNWYVDGVEVHNAKTKPCEEQYGSTYRCVSVLTVLHQDWLNGKEYKCKVSNKALPAPIEKTISKAKGQPREPQVYTLPPSREEMTKNQVSLTCLVKGFYPSDIAVEWESNGQPENNYKTTPPVLDSDGSFFLYSKLTVDKSRWQQGNVFSCSVMHEALHNHYTQKSLSLSPGK

SEQ ID NO: 2281 - protein, 987 aa, Artificial Sequence
  Synthetic
DIQMTQSPSSLSASVGDRVTITCKASQDVSTAVAWYQQKPGKAPKLLIYSASYRYTGVPDRFTGSGSGTDFTLTISSLQPEDFATYYCQQHYSTPPYTFGCGTKVEIKRGGGGSGGGGSGGGGSQVQLVQSGAEVKKPGASVKVSCKASGYAFSSSWMNWVRQAPGQCLEWIGRIYPGDADAKYNAKFKGKATLTADKSTSTAYMELSSLRSEDTAVYYCARSTMIATGAMDYWGQGTLVTVSSSGGGGSEVQLVESGGGLVQPGGSLKLSCAASGFTFNKYAINWVRQAPGKGLEWVARIRSKYNNYATYYADAVKDRFTISRDDSKNTVYLQMNNLKTEDTAVYYCARAGNFGSSYISYWAYWGQGTLVTVSSGGGGSGGGGSGGGGSQTVVTQEPSLTVSPGGTVTITCGSSTGAVTSGNYPNWVQKKPGQAPRGLIGGTKFLAPGTPARFSGSLSGGKAALTLSGVQPEDEAEYYCVLWYSNRWVFGSGTKLTVLGGGGDKTHTCPPCPAPELLGGPSVFLFPPKPKDTLMISRTPEVTCVVVDVSHEDPEVKFNWYVDGVEVHNAKTKPCEEQYGSTYRCVSVLTVLHQDWLNGKEYKCKVSNKALPAPIEKTISKAKGQPREPQVYTLPPSREEMTKNQVSLTCLVKGFYPSDIAVEWESNGQPENNYKTTPPVLDSDGSFFLYSKLTVDKSRWQQGNVFSCSVMHEALHNHYTQKSLSLSPGKGGGGSGGGGSGGGGSGGGGSGGGGSGGGGSDKTHTCPPCPAPELLGGPSVFLFPPKPKDTLMISRTPEVTCVVVDVSHEDPEVKFNWYVDGVEVHNAKTKPCEEQYGSTYRCVSVLTVLHQDWLNGKEYKCKVSNKALPAPIEKTISKAKGQPREPQVYTLPPSREEMTKNQVSLTCLVKGFYPSDIAVEWESNGQPENNYKTTPPVLDSDGSFFLYSKLTVDKSRWQQGNVFSCSVMHEALHNHYTQKSLSLSPGK

SEQ ID NO: 2282 - protein, 987 aa, Artificial Sequence
  Synthetic
DIQMTQSPSSLSASVGDRVTITCKASQDVSTAVAWYQQKPGKAPKLLIYSASYRYTGVPDRFTGSGSGTDFTLTISSLQPEDFATYYCQQHYSTPPYTFGCGTKVEIKRGGGGSGGGGSGGGGSQVQLVQSGAEVKKPGASVKVSCKASGYAFSSSWMNWVRQAPGQCLEWIGRIYPGDADAKYNAKFKGKATLTADKSTSTAYMELSSLRSEDTAVYYCARSTMIATGAMDYWGQGTLVTVSSSGGGGSEVQLVESGGGLVQPGGSLKLSCAASGFTFNKYAMNWVRQAPGKGLEWVARIRSKYNNYATYYAEAVKGRFTISRDDSKNTVYLQMNNLKTEDTAVYYCVRNENIGTSYISYWAYWGQGTLVTVSSGGGGSGGGGSGGGGSQTVVTQEPSLTVSPGGTVTITCGSSTGAVTSGNYPNWVQQKPGQAPRGLIGGTKFLAPGTPARFSGSLSGGKAALTLSGVQPEDEAEYYCVLWYSNRWVFGSGTKLTVLGGGGDKTHTCPPCPAPELLGGPSVFLFPPKPKDTLMISRTPEVTCVVVDVSHEDPEVKFNWYVDGVEVHNAKTKPCEEQYGSTYRCVSVLTVLHQDWLNGKEYKCKVSNKALPAPIEKTISKAKGQPREPQVYTLPPSREEMTKNQVSLTCLVKGFYPSDIAVEWESNGQPENNYKTTPPVLDSDGSFFLYSKLTVDKSRWQQGNVFSCSVMHEALHNHYTQKSLSLSPGKGGGGSGGGGSGGGGSGGGGSGGGGSGGGGSDKTHTCPPCPAPELLGGPSVFLFPPKPKDTLMISRTPEVTCVVVDVSHEDPEVKFNWYVDGVEVHNAKTKPCEEQYGSTYRCVSVLTVLHQDWLNGKEYKCKVSNKALPAPIEKTISKAKGQPREPQVYTLPPSREEMTKNQVSLTCLVKGFYPSDIAVEWESNGQPENNYKTTPPVLDSDGSFFLYSKLTVDKSRWQQGNVFSCSVMHEALHNHYTQKSLSLSPGK

SEQ ID NO: 2283 - protein, 987 aa, Artificial Sequence
  Synthetic
DIQMTQSPSSLSASVGDRVTITCKASQDVSTAVAWYQQKPGKAPKLLIYSASYRYTGVPDRFTGSGSGTDFTLTISSLQPEDFATYYCQQHYSTPPYTFGCGTKVEIKRGGGGSGGGGSGGGGSQVQLVQSGAEVKKPGASVKVSCKASGYAFSSSWMNWVRQAPGQCLEWIGRIYPGDADAKYNAKFKGKATLTADKSTSTAYMELSSLRSEDTAVYYCARSTMIATGAMDYWGQGTLVTVSSSGGGGSEVQLVESGGGLVQPGGSLKLSCAASGFTFNKYAMNWVRQAPGKGMEWVARIRSKYNNYATYYADAVKDRFTISRDDSKNTLYLQMNNLKTEDTAVYYCVRAGNFGSSYISYFAYWGQGTLVTVSSGGGGSGGGGSGGGGSQTVVTQEPSLTVSPGGTVTITCGSSTGAVTSGNYPNWIQKKPGQAPRGLIGGTKFLAPGTPARFSGSLEGGKAALTLSGVQPEDEAEYYCVLYYSNRWVFGSGTKLTVLGGGGDKTHTCPPCPAPELLGGPSVFLFPPKPKDTLMISRTPEVTCVVVDVSHEDPEVKFNWYVDGVEVHNAKTKPCEEQYGSTYRCVSVLTVLHQDWLNGKEYKCKVSNKALPAPIEKTISKAKGQPREPQVYTLPPSREEMTKNQVSLTCLVKGFYPSDIAVEWESNGQPENNYKTTPPVLDSDGSFFLYSKLTVDKSRWQQGNVFSCSVMHEALHNHYTQKSLSLSPGKGGGGSGGGGSGGGGSGGGGSGGGGSGGGGSDKTHTCPPCPAPELLGGPSVFLFPPKPKDTLMISRTPEVTCVVVDVSHEDPEVKFNWYVDGVEVHNAKTKPCEEQYGSTYRCVSVLTVLHQDWLNGKEYKCKVSNKALPAPIEKTISKAKGQPREPQVYTLPPSREEMTKNQVSLTCLVKGFYPSDIAVEWESNGQPENNYKTTPPVLDSDGSFFLYSKLTVDKSRWQQGNVFSCSVMHEALHNHYTQKSLSLSPGK

SEQ ID NO: 2284 - protein, 987 aa, Artificial Sequence
  Synthetic
DIQMTQSPSSLSASVGDRVTITCKASQDVSTAVAWYQQKPGKAPKLLIYSASYRYTGVPDRFTGSGSGTDFTLTISSLQPEDFATYYCQQHYSTPPYTFGCGTKVEIKRGGGGSGGGGSGGGGSQVQLVQSGAEVKKPGASVKVSCKASGYAFSSSWMNWVRQAPGQCLEWIGRIYPGDADAKYNAKFKGKATLTADKSTSTAYMELSSLRSEDTAVYYCARSTMIATGAMDYWGQGTLVTVSSSGGGGSEVQLVESGGGLVQPGGSLKLSCAASGFTFNKYAMNWVRQAPGKGMEWVARIRSKYNNYATYYADAVKDRFTISRDDSKNTLYLQMNNLKTEDTAVYYCVRAGNFGTSYISYWAYWGQGTLVTVSSGGGGSGGGGSGGGGSQTVVTQEPSLTVSPGGTVTITCGSSTGAVTSGNYPNWVQKKPGQAPRGLIGGTKFLAPGTPARFSGSLSGGKAALTLSGVQPEDEAEYYCVLWYSNRWVFGSGTKLTVLGGGGDKTHTCPPCPAPELLGGPSVFLFPPKPKDTLMISRTPEVTCVVVDVSHEDPEVKFNWYVDGVEVHNAKTKPCEEQYGSTYRCVSVLTVLHQDWLNGKEYKCKVSNKALPAPIEKTISKAKGQPREPQVYTLPPSREEMTKNQVSLTCLVKGFYPSDIAVEWESNGQPENNYKTTPPVLDSDGSFFLYSKLTVDKSRWQQGNVFSCSVMHEALHNHYTQKSLSLSPGKGGGGSGGGGSGGGGSGGGGSGGGGSGGGGSDKTHTCPPCPAPELLGGPSVFLFPPKPKDTLMISRTPEVTCVVVDVSHEDPEVKFNWYVDGVEVHNAKTKPCEEQYGSTYRCVSVLTVLHQDWLNGKEYKCKVSNKALPAPIEKTISKAKGQPREPQVYTLPPSREEMTKNQVSLTCLVKGFYPSDIAVEWESNGQPENNYKTTPPVLDSDGSFFLYSKLTVDKSRWQQGNVFSCSVMHEALHNHYTQKSLSLSPGK

SEQ ID NO: 2285 - protein, 987 aa, Artificial Sequence
  Synthetic
DIQMTQSPSSLSASVGDRVTITCKASQDVSTAVAWYQQKPGKAPKLLIYSASYRYTGVPDRFTGSGSGTDFTLTISSLQPEDFATYYCQQHYSTPPYTFGCGTKVEIKRGGGGSGGGGSGGGGSQVQLVQSGAEVKKPGASVKVSCKASGYAFSSSWMNWVRQAPGQCLEWIGRIYPGDADAKYNAKFKGKATLTADKSTSTAYMELSSLRSEDTAVYYCARSTMIATGAMDYWGQGTLVTVSSSGGGGSEVQLVESGGGLVQPGGSLKLSCAASGFTFNKYAINWVREAPGKGLEWVARIRSKYNNYATYYADAVKDRFTISRDDSKNTAYLQMNNLKTEDTAVYYCVRNANFGTSYISYFAYWGQGTLVTVSSGGGGSGGGGSGGGGSQTVVTQEPSLTVSPGGTVTLTCGSSTGAVTSGNYPNWVQKKPGQAPRGLIGGTKFLAPGTPARFSGSLLGGKAALTLSGVQPEDEAEYYCVLWYSNRWVFGSGTKLTVLGGGGDKTHTCPPCPAPELLGGPSVFLFPPKPKDTLMISRTPEVTCVVVDVSHEDPEVKFNWYVDGVEVHNAKTKPCEEQYGSTYRCVSVLTVLHQDWLNGKEYKCKVSNKALPAPIEKTISKAKGQPREPQVYTLPPSREEMTKNQVSLTCLVKGFYPSDIAVEWESNGQPENNYKTTPPVLDSDGSFFLYSKLTVDKSRWQQGNVFSCSVMHEALHNHYTQKSLSLSPGKGGGGSGGGGSGGGGSGGGGSGGGGSGGGGSDKTHTCPPCPAPELLGGPSVFLFPPKPKDTLMISRTPEVTCVVVDVSHEDPEVKFNWYVDGVEVHNAKTKPCEEQYGSTYRCVSVLTVLHQDWLNGKEYKCKVSNKALPAPIEKTISKAKGQPREPQVYTLPPSREEMTKNQVSLTCLVKGFYPSDIAVEWESNGQPENNYKTTPPVLDSDGSFFLYSKLTVDKSRWQQGNVFSCSVMHEALHNHYTQKSLSLSPGK

SEQ ID NO: 2286 - protein, 5 aa, Artificial Sequence
  Synthetic
GYYMH

SEQ ID NO: 2287 - protein, 17 aa, Artificial Sequence
  Synthetic
WINPNSGETNYAQKFQG

SEQ ID NO: 2288 - protein, 20 aa, Artificial Sequence
  Synthetic
DALIVVAPVTRDYYYYGMDV

SEQ ID NO: 2289 - protein, 12 aa, Artificial Sequence
  Synthetic
RASQSVSSSYLA

SEQ ID NO: 2290 - protein, 7 aa, Artificial Sequence
  Synthetic
GASSRAT

SEQ ID NO: 2291 - protein, 9 aa, Artificial Sequence
  Synthetic
QQYGSSPLT

SEQ ID NO: 2292 - protein, 129 aa, Artificial Sequence
  Synthetic
QVQLVQSGAEVKKPGASVKVSCKASGYTFTGYYMHWVRQAPGQCLEWMGWINPNSGETNYAQKFQGRVTMTRDTSISTAYMELSRLRSDDTAVYYCARDALIVVAPVTRDYYYYGMDVWGQGTTVTVSS

SEQ ID NO: 2293 - protein, 108 aa, Artificial Sequence
  Synthetic
EIVLTQSPGTLSLSPGERATLSCRASQSVSSSYLAWYQQKPGQAPRLLIYGASSRATGIPDRFSGSGSGTDFTLTISRLEPEDFAVYYCQQYGSSPLTFGCGTKLEIK

SEQ ID NO: 2294 - protein, 995 aa, Artificial Sequence
  Synthetic
EIVLTQSPGTLSLSPGERATLSCRASQSVSSSYLAWYQQKPGQAPRLLIYGASSRATGIPDRFSGSGSGTDFTLTISRLEPEDFAVYYCQQYGSSPLTFGCGTKLEIKGGGGSGGGGSGGGGSQVQLVQSGAEVKKPGASVKVSCKASGYTFTGYYMHWVRQAPGQCLEWMGWINPNSGETNYAQKFQGRVTMTRDTSISTAYMELSRLRSDDTAVYYCARDALIVVAPVTRDYYYYGMDVWGQGTTVTVSSSGGGGSEVQLVESGGGLVQPGGSLKLSCAASGFTFNKYAMNWVRQAPGKGLEWVARIRSKYNNYATYYADSVKDRFTISRDDSKNTAYLQMNNLKTEDTAVYYCVRHGNFGNSYISYWAYWGQGTLVTVSSGGGGSGGGGSGGGGSQTVVTQEPSLTVSPGGTVTLTCGSSTGAVTSGNYPNWVQQKPGQAPRGLIGGTKFLAPGTPARFSGSLLGGKAALTLSGVQPEDEAEYYCVLWYSNRWVFGGGTKLTVLGGGGDKTHTCPPCPAPELLGGPSVFLFPPKPKDTLMISRTPEVTCVVVDVSHEDPEVKFNWYVDGVEVHNAKTKPCEEQYGSTYRCVSVLTVLHQDWLNGKEYKCKVSNKALPAPIEKTISKAKGQPREPQVYTLPPSREEMTKNQVSLTCLVKGFYPSDIAVEWESNGQPENNYKTTPPVLDSDGSFFLYSKLTVDKSRWQQGNVFSCSVMHEALHNHYTQKSLSLSPGKGGGGSGGGGSGGGGSGGGGSGGGGSGGGGSDKTHTCPPCPAPELLGGPSVFLFPPKPKDTLMISRTPEVTCVVVDVSHEDPEVKFNWYVDGVEVHNAKTKPCEEQYGSTYRCVSVLTVLHQDWLNGKEYKCKVSNKALPAPIEKTISKAKGQPREPQVYTLPPSREEMTKNQVSLTCLVKGFYPSDIAVEWESNGQPENNYKTTPPVLDSDGSFFLYSKLTVDKSRWQQGNVFSCSVMHEALHNHYTQKSLSLSPGK

SEQ ID NO: 2295 - protein, 995 aa, Artificial Sequence
  Synthetic
EIVLTQSPGTLSLSPGERATLSCRASQSVSSSYLAWYQQKPGQAPRLLIYGASSRATGIPDRFSGSGSGTDFTLTISRLEPEDFAVYYCQQYGSSPLTFGCGTKLEIKGGGGSGGGGSGGGGSQVQLVQSGAEVKKPGASVKVSCKASGYTFTGYYMHWVRQAPGQCLEWMGWINPNSGETNYAQKFQGRVTMTRDTSISTAYMELSRLRSDDTAVYYCARDALIVVAPVTRDYYYYGMDVWGQGTTVTVSSSGGGGSEVQLVESGGGLVQPGGSLKLSCAASGFTFNKYAINWVRQAPGKGLEWVARIRSKYNNYATYYADAVKDRFTISRDDSKNTVYLQMNNLKTEDTAVYYCARAGNFGSSYISYWAYWGQGTLVTVSSGGGGSGGGGSGGGGSQTVVTQEPSLTVSPGGTVTITCGSSTGAVTSGNYPNWVQKKPGQAPRGLIGGTKFLAPGTPARFSGSLSGGKAALTLSGVQPEDEAEYYCVLWYSNRWVFGSGTKLTVLGGGGDKTHTCPPCPAPELLGGPSVFLFPPKPKDTLMISRTPEVTCVVVDVSHEDPEVKFNWYVDGVEVHNAKTKPCEEQYGSTYRCVSVLTVLHQDWLNGKEYKCKVSNKALPAPIEKTISKAKGQPREPQVYTLPPSREEMTKNQVSLTCLVKGFYPSDIAVEWESNGQPENNYKTTPPVLDSDGSFFLYSKLTVDKSRWQQGNVFSCSVMHEALHNHYTQKSLSLSPGKGGGGSGGGGSGGGGSGGGGSGGGGSGGGGSDKTHTCPPCPAPELLGGPSVFLFPPKPKDTLMISRTPEVTCVVVDVSHEDPEVKFNWYVDGVEVHNAKTKPCEEQYGSTYRCVSVLTVLHQDWLNGKEYKCKVSNKALPAPIEKTISKAKGQPREPQVYTLPPSREEMTKNQVSLTCLVKGFYPSDIAVEWESNGQPENNYKTTPPVLDSDGSFFLYSKLTVDKSRWQQGNVFSCSVMHEALHNHYTQKSLSLSPGK

SEQ ID NO: 2296 - protein, 995 aa, Artificial Sequence
  Synthetic
EIVLTQSPGTLSLSPGERATLSCRASQSVSSSYLAWYQQKPGQAPRLLIYGASSRATGIPDRFSGSGSGTDFTLTISRLEPEDFAVYYCQQYGSSPLTFGCGTKLEIKGGGGSGGGGSGGGGSQVQLVQSGAEVKKPGASVKVSCKASGYTFTGYYMHWVRQAPGQCLEWMGWINPNSGETNYAQKFQGRVTMTRDTSISTAYMELSRLRSDDTAVYYCARDALIVVAPVTRDYYYYGMDVWGQGTTVTVSSSGGGGSEVQLVESGGGLVQPGGSLKLSCAASGFTFNKYAMNWVRQAPGKGLEWVARIRSKYNNYATYYAEAVKGRFTISRDDSKNTVYLQMNNLKTEDTAVYYCVRNENIGTSYISYWAYWGQGTLVTVSSGGGGSGGGGSGGGGSQTVVTQEPSLTVSPGGTVTITCGSSTGAVTSGNYPNWVQQKPGQAPRGLIGGTKFLAPGTPARFSGSLSGGKAALTLSGVQPEDEAEYYCVLWYSNRWVFGSGTKLTVLGGGGDKTHTCPPCPAPELLGGPSVFLFPPKPKDTLMISRTPEVTCVVVDVSHEDPEVKFNWYVDGVEVHNAKTKPCEEQYGSTYRCVSVLTVLHQDWLNGKEYKCKVSNKALPAPIEKTISKAKGQPREPQVYTLPPSREEMTKNQVSLTCLVKGFYPSDIAVEWESNGQPENNYKTTPPVLDSDGSFFLYSKLTVDKSRWQQGNVFSCSVMHEALHNHYTQKSLSLSPGKGGGGSGGGGSGGGGSGGGGSGGGGSGGGGSDKTHTCPPCPAPELLGGPSVFLFPPKPKDTLMISRTPEVTCVVVDVSHEDPEVKFNWYVDGVEVHNAKTKPCEEQYGSTYRCVSVLTVLHQDWLNGKEYKCKVSNKALPAPIEKTISKAKGQPREPQVYTLPPSREEMTKNQVSLTCLVKGFYPSDIAVEWESNGQPENNYKTTPPVLDSDGSFFLYSKLTVDKSRWQQGNVFSCSVMHEALHNHYTQKSLSLSPGK

SEQ ID NO: 2297 - protein, 995 aa, Artificial Sequence
  Synthetic
EIVLTQSPGTLSLSPGERATLSCRASQSVSSSYLAWYQQKPGQAPRLLIYGASSRATGIPDRFSGSGSGTDFTLTISRLEPEDFAVYYCQQYGSSPLTFGCGTKLEIKGGGGSGGGGSGGGGSQVQLVQSGAEVKKPGASVKVSCKASGYTFTGYYMHWVRQAPGQCLEWMGWINPNSGETNYAQKFQGRVTMTRDTSISTAYMELSRLRSDDTAVYYCARDALIVVAPVTRDYYYYGMDVWGQGTTVTVSSSGGGGSEVQLVESGGGLVQPGGSLKLSCAASGFTFNKYAMNWVRQAPGKGMEWVARIRSKYNNYATYYADAVKDRFTISRDDSKNTLYLQMNNLKTEDTAVYYCVRAGNFGSSYISYFAYWGQGTLVTVSSGGGGSGGGGSGGGGSQTVVTQEPSLTVSPGGTVTITCGSSTGAVTSGNYPNWIQKKPGQAPRGLIGGTKFLAPGTPARFSGSLEGGKAALTLSGVQPEDEAEYYCVLYYSNRWVFGSGTKLTVLGGGGDKTHTCPPCPAPELLGGPSVFLFPPKPKDTLMISRTPEVTCVVVDVSHEDPEVKFNWYVDGVEVHNAKTKPCEEQYGSTYRCVSVLTVLHQDWLNGKEYKCKVSNKALPAPIEKTISKAKGQPREPQVYTLPPSREEMTKNQVSLTCLVKGFYPSDIAVEWESNGQPENNYKTTPPVLDSDGSFFLYSKLTVDKSRWQQGNVFSCSVMHEALHNHYTQKSLSLSPGKGGGGSGGGGSGGGGSGGGGSGGGGSGGGGSDKTHTCPPCPAPELLGGPSVFLFPPKPKDTLMISRTPEVTCVVVDVSHEDPEVKFNWYVDGVEVHNAKTKPCEEQYGSTYRCVSVLTVLHQDWLNGKEYKCKVSNKALPAPIEKTISKAKGQPREPQVYTLPPSREEMTKNQVSLTCLVKGFYPSDIAVEWESNGQPENNYKTTPPVLDSDGSFFLYSKLTVDKSRWQQGNVFSCSVMHEALHNHYTQKSLSLSPGK

SEQ ID NO: 2298 - protein, 995 aa, Artificial Sequence
  Synthetic
EIVLTQSPGTLSLSPGERATLSCRASQSVSSSYLAWYQQKPGQAPRLLIYGASSRATGIPDRFSGSGSGTDFTLTISRLEPEDFAVYYCQQYGSSPLTFGCGTKLEIKGGGGSGGGGSGGGGSQVQLVQSGAEVKKPGASVKVSCKASGYTFTGYYMHWVRQAPGQCLEWMGWINPNSGETNYAQKFQGRVTMTRDTSISTAYMELSRLRSDDTAVYYCARDALIVVAPVTRDYYYYGMDVWGQGTTVTVSSSGGGGSEVQLVESGGGLVQPGGSLKLSCAASGFTFNKYAINWVREAPGKGLEWVARIRSKYNNYATYYADAVKDRFTISRDDSKNTAYLQMNNLKTEDTAVYYCVRNANFGTSYISYFAYWGQGTLVTVSSGGGGSGGGGSGGGGSQTVVTQEPSLTVSPGGTVTLTCGSSTGAVTSGNYPNWVQKKPGQAPRGLIGGTKFLAPGTPARFSGSLLGGKAALTLSGVQPEDEAEYYCVLWYSNRWVFGSGTKLTVLGGGGDKTHTCPPCPAPELLGGPSVFLFPPKPKDTLMISRTPEVTCVVVDVSHEDPEVKFNWYVDGVEVHNAKTKPCEEQYGSTYRCVSVLTVLHQDWLNGKEYKCKVSNKALPAPIEKTISKAKGQPREPQVYTLPPSREEMTKNQVSLTCLVKGFYPSDIAVEWESNGQPENNYKTTPPVLDSDGSFFLYSKLTVDKSRWQQGNVFSCSVMHEALHNHYTQKSLSLSPGKGGGGSGGGGSGGGGSGGGGSGGGGSGGGGSDKTHTCPPCPAPELLGGPSVFLFPPKPKDTLMISRTPEVTCVVVDVSHEDPEVKFNWYVDGVEVHNAKTKPCEEQYGSTYRCVSVLTVLHQDWLNGKEYKCKVSNKALPAPIEKTISKAKGQPREPQVYTLPPSREEMTKNQVSLTCLVKGFYPSDIAVEWESNGQPENNYKTTPPVLDSDGSFFLYSKLTVDKSRWQQGNVFSCSVMHEALHNHYTQKSLSLSPGK

SEQ ID NO: 2299 - protein, 995 aa, Artificial Sequence
  Synthetic
EIVLTQSPGTLSLSPGERATLSCRASQSVSSSYLAWYQQKPGQAPRLLIYGASSRATGIPDRFSGSGSGTDFTLTISRLEPEDFAVYYCQQYGSSPLTFGCGTKLEIKGGGGSGGGGSGGGGSQVQLVQSGAEVKKPGASVKVSCKASGYTFTGYYMHWVRQAPGQCLEWMGWINPNSGETNYAQKFQGRVTMTRDTSISTAYMELSRLRSDDTAVYYCARDALIVVAPVTRDYYYYGMDVWGQGTTVTVSSSGGGGSEVQLVESGGGLVQPGGSLKLSCAASGFTFNKYAMNWVRQAPGKGMEWVARIRSKYNNYATYYADAVKDRFTISRDDSKNTLYLQMNNLKTEDTAVYYCVRAGNFGTSYISYWAYWGQGTLVTVSSGGGGSGGGGSGGGGSQTVVTQEPSLTVSPGGTVTITCGSSTGAVTSGNYPNWVQKKPGQAPRGLIGGTKFLAPGTPARFSGSLSGGKAALTLSGVQPEDEAEYYCVLWYSNRWVFGSGTKLTVLGGGGDKTHTCPPCPAPELLGGPSVFLFPPKPKDTLMISRTPEVTCVVVDVSHEDPEVKFNWYVDGVEVHNAKTKPCEEQYGSTYRCVSVLTVLHQDWLNGKEYKCKVSNKALPAPIEKTISKAKGQPREPQVYTLPPSREEMTKNQVSLTCLVKGFYPSDIAVEWESNGQPENNYKTTPPVLDSDGSFFLYSKLTVDKSRWQQGNVFSCSVMHEALHNHYTQKSLSLSPGKGGGGSGGGGSGGGGSGGGGSGGGGSGGGGSDKTHTCPPCPAPELLGGPSVFLFPPKPKDTLMISRTPEVTCVVVDVSHEDPEVKFNWYVDGVEVHNAKTKPCEEQYGSTYRCVSVLTVLHQDWLNGKEYKCKVSNKALPAPIEKTISKAKGQPREPQVYTLPPSREEMTKNQVSLTCLVKGFYPSDIAVEWESNGQPENNYKTTPPVLDSDGSFFLYSKLTVDKSRWQQGNVFSCSVMHEALHNHYTQKSLSLSPGK

SEQ ID NO: 2300 - protein, 5 aa, Artificial Sequence
  Synthetic
GYYMH

SEQ ID NO: 2301 - protein, 17 aa, Artificial Sequence
  Synthetic
WINPNSGGTKYAQKFQG

SEQ ID NO: 2302 - protein, 16 aa, Artificial Sequence
  Synthetic
DRITVAGTYYYYGMDV

SEQ ID NO: 2303 - protein, 11 aa, Artificial Sequence
  Synthetic
RASQGVNNWLA

SEQ ID NO: 2304 - protein, 7 aa, Artificial Sequence
  Synthetic
TASSLQS

SEQ ID NO: 2305 - protein, 9 aa, Artificial Sequence
  Synthetic
QQANSFPIT

SEQ ID NO: 2306 - protein, 125 aa, Artificial Sequence
  Synthetic
QVQLVQSGAEVKKPGASVKVSCKASGYTFTGYYMHWVRQAPGQCLEWMGWINPNSGGTKYAQKFQGRVTMTRDTSISTAYMELSRLRSDDTAVYYCARDRITVAGTYYYYGMDVWGQGTTVTVSS

SEQ ID NO: 2307 - protein, 107 aa, Artificial Sequence
  Synthetic
DIQMTQSPSSVSASVGDRVTITCRASQGVNNWLAWYQQKPGKAPKLLIYTASSLQSGVPSRFSGSGSGTDFTLTIRSLQPEDFATYYCQQANSFPITFGCGTRLEIK

SEQ ID NO: 2308 - protein, 107 aa, Artificial Sequence
  Synthetic
EIQMTQSPSSVSASVGDRVTITCRASQGVNNWLAWYQQKPGKAPKLLIYTASSLQSGVPSRFSGSGSGTDFTLTIRSLQPEDFATYYCQQANSFPITFGCGTRLEIK

SEQ ID NO: 2309 - protein, 990 aa, Artificial Sequence
  Synthetic
QVQLVQSGAEVKKPGASVKVSCKASGYTFTGYYMHWVRQAPGQCLEWMGWINPNSGGTKYAQKFQGRVTMTRDTSISTAYMELSRLRSDDTAVYYCARDRITVAGTYYYYGMDVWGQGTTVTVSSGGGGSGGGGSGGGGSDIQMTQSPSSVSASVGDRVTITCRASQGVNNWLAWYQQKPGKAPKLLIYTASSLQSGVPSRFSGSGSGTDFTLTIRSLQPEDFATYYCQQANSFPITFGCGTRLEIKSGGGGSEVQLVESGGGLVQPGGSLKLSCAASGFTFNKYAMNWVRQAPGKGLEWVARIRSKYNNYATYYADSVKDRFTISRDDSKNTAYLQMNNLKTEDTAVYYCVRHGNFGNSYISYWAYWGQGTLVTVSSGGGGSGGGGSGGGGSQTVVTQEPSLTVSPGGTVTLTCGSSTGAVTSGNYPNWVQQKPGQAPRGLIGGTKFLAPGTPARFSGSLLGGKAALTLSGVQPEDEAEYYCVLWYSNRWVFGGGTKLTVLGGGGDKTHTCPPCPAPELLGGPSVFLFPPKPKDTLMISRTPEVTCVVVDVSHEDPEVKFNWYVDGVEVHNAKTKPCEEQYGSTYRCVSVLTVLHQDWLNGKEYKCKVSNKALPAPIEKTISKAKGQPREPQVYTLPPSREEMTKNQVSLTCLVKGFYPSDIAVEWESNGQPENNYKTTPPVLDSDGSFFLYSKLTVDKSRWQQGNVFSCSVMHEALHNHYTQKSLSLSPGKGGGGSGGGGSGGGGSGGGGSGGGGSGGGGSDKTHTCPPCPAPELLGGPSVFLFPPKPKDTLMISRTPEVTCVVVDVSHEDPEVKFNWYVDGVEVHNAKTKPCEEQYGSTYRCVSVLTVLHQDWLNGKEYKCKVSNKALPAPIEKTISKAKGQPREPQVYTLPPSREEMTKNQVSLTCLVKGFYPSDIAVEWESNGQPENNYKTTPPVLDSDGSFFLYSKLTVDKSRWQQGNVFSCSVMHEALHNHYTQKSLSLSPGK

SEQ ID NO: 2310 - protein, 990 aa, Artificial Sequence
  Synthetic
QVQLVQSGAEVKKPGASVKVSCKASGYTFTGYYMHWVRQAPGQCLEWMGWINPNSGGTKYAQKFQGRVTMTRDTSISTAYMELSRLRSDDTAVYYCARDRITVAGTYYYYGMDVWGQGTTVTVSSGGGGSGGGGSGGGGSDIQMTQSPSSVSASVGDRVTITCRASQGVNNWLAWYQQKPGKAPKLLIYTASSLQSGVPSRFSGSGSGTDFTLTIRSLQPEDFATYYCQQANSFPITFGCGTRLEIKSGGGGSEVQLVESGGGLVQPGGSLKLSCAASGFTFNKYAINWVRQAPGKGLEWVARIRSKYNNYATYYADAVKDRFTISRDDSKNTVYLQMNNLKTEDTAVYYCARAGNFGSSYISYWAYWGQGTLVTVSSGGGGSGGGGSGGGGSQTVVTQEPSLTVSPGGTVTITCGSSTGAVTSGNYPNWVQKKPGQAPRGLIGGTKFLAPGTPARFSGSLSGGKAALTLSGVQPEDEAEYYCVLWYSNRWVFGSGTKLTVLGGGGDKTHTCPPCPAPELLGGPSVFLFPPKPKDTLMISRTPEVTCVVVDVSHEDPEVKFNWYVDGVEVHNAKTKPCEEQYGSTYRCVSVLTVLHQDWLNGKEYKCKVSNKALPAPIEKTISKAKGQPREPQVYTLPPSREEMTKNQVSLTCLVKGFYPSDIAVEWESNGQPENNYKTTPPVLDSDGSFFLYSKLTVDKSRWQQGNVFSCSVMHEALHNHYTQKSLSLSPGKGGGGSGGGGSGGGGSGGGGSGGGGSGGGGSDKTHTCPPCPAPELLGGPSVFLFPPKPKDTLMISRTPEVTCVVVDVSHEDPEVKFNWYVDGVEVHNAKTKPCEEQYGSTYRCVSVLTVLHQDWLNGKEYKCKVSNKALPAPIEKTISKAKGQPREPQVYTLPPSREEMTKNQVSLTCLVKGFYPSDIAVEWESNGQPENNYKTTPPVLDSDGSFFLYSKLTVDKSRWQQGNVFSCSVMHEALHNHYTQKSLSLSPGK

SEQ ID NO: 2311 - protein, 990 aa, Artificial Sequence
  Synthetic
QVQLVQSGAEVKKPGASVKVSCKASGYTFTGYYMHWVRQAPGQCLEWMGWINPNSGGTKYAQKFQGRVTMTRDTSISTAYMELSRLRSDDTAVYYCARDRITVAGTYYYYGMDVWGQGTTVTVSSGGGGSGGGGSGGGGSDIQMTQSPSSVSASVGDRVTITCRASQGVNNWLAWYQQKPGKAPKLLIYTASSLQSGVPSRFSGSGSGTDFTLTIRSLQPEDFATYYCQQANSFPITFGCGTRLEIKSGGGGSEVQLVESGGGLVQPGGSLKLSCAASGFTFNKYAMNWVRQAPGKGLEWVARIRSKYNNYATYYAEAVKGRFTISRDDSKNTVYLQMNNLKTEDTAVYYCVRNENIGTSYISYWAYWGQGTLVTVSSGGGGSGGGGSGGGGSQTVVTQEPSLTVSPGGTVTITCGSSTGAVTSGNYPNWVQQKPGQAPRGLIGGTKFLAPGTPARFSGSLSGGKAALTLSGVQPEDEAEYYCVLWYSNRWVFGSGTKLTVLGGGGDKTHTCPPCPAPELLGGPSVFLFPPKPKDTLMISRTPEVTCVVVDVSHEDPEVKFNWYVDGVEVHNAKTKPCEEQYGSTYRCVSVLTVLHQDWLNGKEYKCKVSNKALPAPIEKTISKAKGQPREPQVYTLPPSREEMTKNQVSLTCLVKGFYPSDIAVEWESNGQPENNYKTTPPVLDSDGSFFLYSKLTVDKSRWQQGNVFSCSVMHEALHNHYTQKSLSLSPGKGGGGSGGGGSGGGGSGGGGSGGGGSGGGGSDKTHTCPPCPAPELLGGPSVFLFPPKPKDTLMISRTPEVTCVVVDVSHEDPEVKFNWYVDGVEVHNAKTKPCEEQYGSTYRCVSVLTVLHQDWLNGKEYKCKVSNKALPAPIEKTISKAKGQPREPQVYTLPPSREEMTKNQVSLTCLVKGFYPSDIAVEWESNGQPENNYKTTPPVLDSDGSFFLYSKLTVDKSRWQQGNVFSCSVMHEALHNHYTQKSLSLSPGK

SEQ ID NO: 2312 - protein, 990 aa, Artificial Sequence
  Synthetic
QVQLVQSGAEVKKPGASVKVSCKASGYTFTGYYMHWVRQAPGQCLEWMGWINPNSGGTKYAQKFQGRVTMTRDTSISTAYMELSRLRSDDTAVYYCARDRITVAGTYYYYGMDVWGQGTTVTVSSGGGGSGGGGSGGGGSDIQMTQSPSSVSASVGDRVTITCRASQGVNNWLAWYQQKPGKAPKLLIYTASSLQSGVPSRFSGSGSGTDFTLTIRSLQPEDFATYYCQQANSFPITFGCGTRLEIKSGGGGSEVQLVESGGGLVQPGGSLKLSCAASGFTFNKYAMNWVRQAPGKGMEWVARIRSKYNNYATYYADAVKDRFTISRDDSKNTLYLQMNNLKTEDTAVYYCVRAGNFGSSYISYFAYWGQGTLVTVSSGGGGSGGGGSGGGGSQTVVTQEPSLTVSPGGTVTITCGSSTGAVTSGNYPNWIQKKPGQAPRGLIGGTKFLAPGTPARFSGSLEGGKAALTLSGVQPEDEAEYYCVLYYSNRWVFGSGTKLTVLGGGGDKTHTCPPCPAPELLGGPSVFLFPPKPKDTLMISRTPEVTCVVVDVSHEDPEVKFNWYVDGVEVHNAKTKPCEEQYGSTYRCVSVLTVLHQDWLNGKEYKCKVSNKALPAPIEKTISKAKGQPREPQVYTLPPSREEMTKNQVSLTCLVKGFYPSDIAVEWESNGQPENNYKTTPPVLDSDGSFFLYSKLTVDKSRWQQGNVFSCSVMHEALHNHYTQKSLSLSPGKGGGGSGGGGSGGGGSGGGGSGGGGSGGGGSDKTHTCPPCPAPELLGGPSVFLFPPKPKDTLMISRTPEVTCVVVDVSHEDPEVKFNWYVDGVEVHNAKTKPCEEQYGSTYRCVSVLTVLHQDWLNGKEYKCKVSNKALPAPIEKTISKAKGQPREPQVYTLPPSREEMTKNQVSLTCLVKGFYPSDIAVEWESNGQPENNYKTTPPVLDSDGSFFLYSKLTVDKSRWQQGNVFSCSVMHEALHNHYTQKSLSLSPGK

SEQ ID NO: 2313 - protein, 990 aa, Artificial Sequence
  Synthetic
QVQLVQSGAEVKKPGASVKVSCKASGYTFTGYYMHWVRQAPGQCLEWMGWINPNSGGTKYAQKFQGRVTMTRDTSISTAYMELSRLRSDDTAVYYCARDRITVAGTYYYYGMDVWGQGTTVTVSSGGGGSGGGGSGGGGSDIQMTQSPSSVSASVGDRVTITCRASQGVNNWLAWYQQKPGKAPKLLIYTASSLQSGVPSRFSGSGSGTDFTLTIRSLQPEDFATYYCQQANSFPITFGCGTRLEIKSGGGGSEVQLVESGGGLVQPGGSLKLSCAASGFTFNKYAMNWVRQAPGKGMEWVARIRSKYNNYATYYADAVKDRFTISRDDSKNTLYLQMNNLKTEDTAVYYCVRAGNFGTSYISYWAYWGQGTLVTVSSGGGGSGGGGSGGGGSQTVVTQEPSLTVSPGGTVTITCGSSTGAVTSGNYPNWVQKKPGQAPRGLIGGTKFLAPGTPARFSGSLSGGKAALTLSGVQPEDEAEYYCVLWYSNRWVFGSGTKLTVLGGGGDKTHTCPPCPAPELLGGPSVFLFPPKPKDTLMISRTPEVTCVVVDVSHEDPEVKFNWYVDGVEVHNAKTKPCEEQYGSTYRCVSVLTVLHQDWLNGKEYKCKVSNKALPAPIEKTISKAKGQPREPQVYTLPPSREEMTKNQVSLTCLVKGFYPSDIAVEWESNGQPENNYKTTPPVLDSDGSFFLYSKLTVDKSRWQQGNVFSCSVMHEALHNHYTQKSLSLSPGKGGGGSGGGGSGGGGSGGGGSGGGGSGGGGSDKTHTCPPCPAPELLGGPSVFLFPPKPKDTLMISRTPEVTCVVVDVSHEDPEVKFNWYVDGVEVHNAKTKPCEEQYGSTYRCVSVLTVLHQDWLNGKEYKCKVSNKALPAPIEKTISKAKGQPREPQVYTLPPSREEMTKNQVSLTCLVKGFYPSDIAVEWESNGQPENNYKTTPPVLDSDGSFFLYSKLTVDKSRWQQGNVFSCSVMHEALHNHYTQKSLSLSPGK

SEQ ID NO: 2314 - protein, 990 aa, Artificial Sequence
  Synthetic
QVQLVQSGAEVKKPGASVKVSCKASGYTFTGYYMHWVRQAPGQCLEWMGWINPNSGGTKYAQKFQGRVTMTRDTSISTAYMELSRLRSDDTAVYYCARDRITVAGTYYYYGMDVWGQGTTVTVSSGGGGSGGGGSGGGGSDIQMTQSPSSVSASVGDRVTITCRASQGVNNWLAWYQQKPGKAPKLLIYTASSLQSGVPSRFSGSGSGTDFTLTIRSLQPEDFATYYCQQANSFPITFGCGTRLEIKSGGGGSEVQLVESGGGLVQPGGSLKLSCAASGFTFNKYAINWVREAPGKGLEWVARIRSKYNNYATYYADAVKDRFTISRDDSKNTAYLQMNNLKTEDTAVYYCVRNANFGTSYISYFAYWGQGTLVTVSSGGGGSGGGGSGGGGSQTVVTQEPSLTVSPGGTVTLTCGSSTGAVTSGNYPNWVQKKPGQAPRGLIGGTKFLAPGTPARFSGSLLGGKAALTLSGVQPEDEAEYYCVLWYSNRWVFGSGTKLTVLGGGGDKTHTCPPCPAPELLGGPSVFLFPPKPKDTLMISRTPEVTCVVVDVSHEDPEVKFNWYVDGVEVHNAKTKPCEEQYGSTYRCVSVLTVLHQDWLNGKEYKCKVSNKALPAPIEKTISKAKGQPREPQVYTLPPSREEMTKNQVSLTCLVKGFYPSDIAVEWESNGQPENNYKTTPPVLDSDGSFFLYSKLTVDKSRWQQGNVFSCSVMHEALHNHYTQKSLSLSPGKGGGGSGGGGSGGGGSGGGGSGGGGSGGGGSDKTHTCPPCPAPELLGGPSVFLFPPKPKDTLMISRTPEVTCVVVDVSHEDPEVKFNWYVDGVEVHNAKTKPCEEQYGSTYRCVSVLTVLHQDWLNGKEYKCKVSNKALPAPIEKTISKAKGQPREPQVYTLPPSREEMTKNQVSLTCLVKGFYPSDIAVEWESNGQPENNYKTTPPVLDSDGSFFLYSKLTVDKSRWQQGNVFSCSVMHEALHNHYTQKSLSLSPGK

SEQ ID NO: 2315 - protein, 5 aa, Artificial Sequence
  Synthetic
SYYWS

SEQ ID NO: 2316 - protein, 16 aa, Artificial Sequence
  Synthetic
YVYYSGTTNYNPSLKS

SEQ ID NO: 2317 - protein, 10 aa, Artificial Sequence
  Synthetic
IAVTGFYFDY

SEQ ID NO: 2318 - protein, 12 aa, Artificial Sequence
  Synthetic
RASQRVNNNYLA

SEQ ID NO: 2319 - protein, 7 aa, Artificial Sequence
  Synthetic
GASSRAT

SEQ ID NO: 2320 - protein, 9 aa, Artificial Sequence
  Synthetic
QQYDRSPLT

SEQ ID NO: 2321 - protein, 118 aa, Artificial Sequence
  Synthetic
QVQLQESGPGLVKPSETLSLTCTVSGGSISSYYWSWIRQPPGKCLEWIGYVYYSGTTNYNPSLKSRVTISVDTSKNQFSLKLSSVTAADTAVYYCASIAVTGFYFDYWGQGTLVTVSS

SEQ ID NO: 2322 - protein, 108 aa, Artificial Sequence
  Synthetic
EIVLTQSPGTLSLSPGERVTLSCRASQRVNNNYLAWYQQRPGQAPRLLIYGASSRATGIPDRFSGSGSGTDFTLTISRLEPEDFAVYYCQQYDRSPLTFGCGTKLEIK

SEQ ID NO: 2323 - protein, 982 aa, Artificial Sequence
  Synthetic
QVQLQESGPGLVKPSETLSLTCTVSGGSISSYYWSWIRQPPGKCLEWIGYVYYSGTTNYNPSLKSRVTISVDTSKNQFSLKLSSVTAADTAVYYCASIAVTGFYFDYWGQGTLVTVSSGGGGSGGGGSGGGGSEIVLTQSPGTLSLSPGERVTLSCRASQRVNNNYLAWYQQRPGQAPRLLIYGASSRATGIPDRFSGSGSGTDFTLTISRLEPEDFAVYYCQQYDRSPLTFGCGTKLEIKSGGGGSEVQLVESGGGLVQPGGSLKLSCAASGFTFNKYAMNWVRQAPGKGLEWVARIRSKYNNYATYYADSVKDRFTISRDDSKNTAYLQMNNLKTEDTAVYYCVRHGNFGNSYISYWAYWGQGTLVTVSSGGGGSGGGGSGGGGSQTVVTQEPSLTVSPGGTVTLTCGSSTGAVTSGNYPNWVQQKPGQAPRGLIGGTKFLAPGTPARFSGSLLGGKAALTLSGVQPEDEAEYYCVLWYSNRWVFGGGTKLTVLGGGGDKTHTCPPCPAPELLGGPSVFLFPPKPKDTLMISRTPEVTCVVVDVSHEDPEVKFNWYVDGVEVHNAKTKPCEEQYGSTYRCVSVLTVLHQDWLNGKEYKCKVSNKALPAPIEKTISKAKGQPREPQVYTLPPSREEMTKNQVSLTCLVKGFYPSDIAVEWESNGQPENNYKTTPPVLDSDGSFFLYSKLTVDKSRWQQGNVFSCSVMHEALHNHYTQKSLSLSPGGGGSGGGGSGGGGSGGGGSGGGGSGGGGSDKTHTCPPCPAPELLGGPSVFLFPPKPKDTLMISRTPEVTCVVVDVSHEDPEVKFNWYVDGVEVHNAKTKPCEEQYGSTYRCVSVLTVLHQDWLNGKEYKCKVSNKALPAPIEKTISKAKGQPREPQVYTLPPSREEMTKNQVSLTCLVKGFYPSDIAVEWESNGQPENNYKTTPPVLDSDGSFFLYSKLTVDKSRWQQGNVFSCSVMHEALHNHYTQKSLSLSPGK

SEQ ID NO: 2324 - protein, 982 aa, Artificial Sequence
  Synthetic
QVQLQESGPGLVKPSETLSLTCTVSGGSISSYYWSWIRQPPGKCLEWIGYVYYSGTTNYNPSLKSRVTISVDTSKNQFSLKLSSVTAADTAVYYCASIAVTGFYFDYWGQGTLVTVSSGGGGSGGGGSGGGGSEIVLTQSPGTLSLSPGERVTLSCRASQRVNNNYLAWYQQRPGQAPRLLIYGASSRATGIPDRFSGSGSGTDFTLTISRLEPEDFAVYYCQQYDRSPLTFGCGTKLEIKSGGGGSEVQLVESGGGLVQPGGSLKLSCAASGFTFNKYAINWVRQAPGKGLEWVARIRSKYNNYATYYADAVKDRFTISRDDSKNTVYLQMNNLKTEDTAVYYCARAGNFGSSYISYWAYWGQGTLVTVSSGGGGSGGGGSGGGGSQTVVTQEPSLTVSPGGTVTITCGSSTGAVTSGNYPNWVQKKPGQAPRGLIGGTKFLAPGTPARFSGSLSGGKAALTLSGVQPEDEAEYYCVLWYSNRWVFGSGTKLTVLGGGGDKTHTCPPCPAPELLGGPSVFLFPPKPKDTLMISRTPEVTCVVVDVSHEDPEVKFNWYVDGVEVHNAKTKPCEEQYGSTYRCVSVLTVLHQDWLNGKEYKCKVSNKALPAPIEKTISKAKGQPREPQVYTLPPSREEMTKNQVSLTCLVKGFYPSDIAVEWESNGQPENNYKTTPPVLDSDGSFFLYSKLTVDKSRWQQGNVFSCSVMHEALHNHYTQKSLSLSPGGGGSGGGGSGGGGSGGGGSGGGGSGGGGSDKTHTCPPCPAPELLGGPSVFLFPPKPKDTLMISRTPEVTCVVVDVSHEDPEVKFNWYVDGVEVHNAKTKPCEEQYGSTYRCVSVLTVLHQDWLNGKEYKCKVSNKALPAPIEKTISKAKGQPREPQVYTLPPSREEMTKNQVSLTCLVKGFYPSDIAVEWESNGQPENNYKTTPPVLDSDGSFFLYSKLTVDKSRWQQGNVFSCSVMHEALHNHYTQKSLSLSPGK

SEQ ID NO: 2325 - protein, 982 aa, Artificial Sequence
  Synthetic
QVQLQESGPGLVKPSETLSLTCTVSGGSISSYYWSWIRQPPGKCLEWIGYVYYSGTTNYNPSLKSRVTISVDTSKNQFSLKLSSVTAADTAVYYCASIAVTGFYFDYWGQGTLVTVSSGGGGSGGGGSGGGGSEIVLTQSPGTLSLSPGERVTLSCRASQRVNNNYLAWYQQRPGQAPRLLIYGASSRATGIPDRFSGSGSGTDFTLTISRLEPEDFAVYYCQQYDRSPLTFGCGTKLEIKSGGGGSEVQLVESGGGLVQPGGSLKLSCAASGFTFNKYAMNWVRQAPGKGLEWVARIRSKYNNYATYYAEAVKGRFTISRDDSKNTVYLQMNNLKTEDTAVYYCVRNENIGTSYISYWAYWGQGTLVTVSSGGGGSGGGGSGGGGSQTVVTQEPSLTVSPGGTVTITCGSSTGAVTSGNYPNWVQQKPGQAPRGLIGGTKFLAPGTPARFSGSLSGGKAALTLSGVQPEDEAEYYCVLWYSNRWVFGSGTKLTVLGGGGDKTHTCPPCPAPELLGGPSVFLFPPKPKDTLMISRTPEVTCVVVDVSHEDPEVKFNWYVDGVEVHNAKTKPCEEQYGSTYRCVSVLTVLHQDWLNGKEYKCKVSNKALPAPIEKTISKAKGQPREPQVYTLPPSREEMTKNQVSLTCLVKGFYPSDIAVEWESNGQPENNYKTTPPVLDSDGSFFLYSKLTVDKSRWQQGNVFSCSVMHEALHNHYTQKSLSLSPGGGGSGGGGSGGGGSGGGGSGGGGSGGGGSDKTHTCPPCPAPELLGGPSVFLFPPKPKDTLMISRTPEVTCVVVDVSHEDPEVKFNWYVDGVEVHNAKTKPCEEQYGSTYRCVSVLTVLHQDWLNGKEYKCKVSNKALPAPIEKTISKAKGQPREPQVYTLPPSREEMTKNQVSLTCLVKGFYPSDIAVEWESNGQPENNYKTTPPVLDSDGSFFLYSKLTVDKSRWQQGNVFSCSVMHEALHNHYTQKSLSLSPGK

SEQ ID NO: 2326 - protein, 982 aa, Artificial Sequence
  Synthetic
QVQLQESGPGLVKPSETLSLTCTVSGGSISSYYWSWIRQPPGKCLEWIGYVYYSGTTNYNPSLKSRVTISVDTSKNQFSLKLSSVTAADTAVYYCASIAVTGFYFDYWGQGTLVTVSSGGGGSGGGGSGGGGSEIVLTQSPGTLSLSPGERVTLSCRASQRVNNNYLAWYQQRPGQAPRLLIYGASSRATGIPDRFSGSGSGTDFTLTISRLEPEDFAVYYCQQYDRSPLTFGCGTKLEIKSGGGGSEVQLVESGGGLVQPGGSLKLSCAASGFTFNKYAMNWVRQAPGKGMEWVARIRSKYNNYATYYADAVKDRFTISRDDSKNTLYLQMNNLKTEDTAVYYCVRAGNFGSSYISYFAYWGQGTLVTVSSGGGGSGGGGSGGGGSQTVVTQEPSLTVSPGGTVTITCGSSTGAVTSGNYPNWIQKKPGQAPRGLIGGTKFLAPGTPARFSGSLEGGKAALTLSGVQPEDEAEYYCVLYYSNRWVFGSGTKLTVLGGGGDKTHTCPPCPAPELLGGPSVFLFPPKPKDTLMISRTPEVTCVVVDVSHEDPEVKFNWYVDGVEVHNAKTKPCEEQYGSTYRCVSVLTVLHQDWLNGKEYKCKVSNKALPAPIEKTISKAKGQPREPQVYTLPPSREEMTKNQVSLTCLVKGFYPSDIAVEWESNGQPENNYKTTPPVLDSDGSFFLYSKLTVDKSRWQQGNVFSCSVMHEALHNHYTQKSLSLSPGGGGSGGGGSGGGGSGGGGSGGGGSGGGGSDKTHTCPPCPAPELLGGPSVFLFPPKPKDTLMISRTPEVTCVVVDVSHEDPEVKFNWYVDGVEVHNAKTKPCEEQYGSTYRCVSVLTVLHQDWLNGKEYKCKVSNKALPAPIEKTISKAKGQPREPQVYTLPPSREEMTKNQVSLTCLVKGFYPSDIAVEWESNGQPENNYKTTPPVLDSDGSFFLYSKLTVDKSRWQQGNVFSCSVMHEALHNHYTQKSLSLSPGK

SEQ ID NO: 2327 - protein, 982 aa, Artificial Sequence
  Synthetic
QVQLQESGPGLVKPSETLSLTCTVSGGSISSYYWSWIRQPPGKCLEWIGYVYYSGTTNYNPSLKSRVTISVDTSKNQFSLKLSSVTAADTAVYYCASIAVTGFYFDYWGQGTLVTVSSGGGGSGGGGSGGGGSEIVLTQSPGTLSLSPGERVTLSCRASQRVNNNYLAWYQQRPGQAPRLLIYGASSRATGIPDRFSGSGSGTDFTLTISRLEPEDFAVYYCQQYDRSPLTFGCGTKLEIKSGGGGSEVQLVESGGGLVQPGGSLKLSCAASGFTFNKYAMNWVRQAPGKGMEWVARIRSKYNNYATYYADAVKDRFTISRDDSKNTLYLQMNNLKTEDTAVYYCVRAGNFGTSYISYWAYWGQGTLVTVSSGGGGSGGGGSGGGGSQTVVTQEPSLTVSPGGTVTITCGSSTGAVTSGNYPNWVQKKPGQAPRGLIGGTKFLAPGTPARFSGSLSGGKAALTLSGVQPEDEAEYYCVLWYSNRWVFGSGTKLTVLGGGGDKTHTCPPCPAPELLGGPSVFLFPPKPKDTLMISRTPEVTCVVVDVSHEDPEVKFNWYVDGVEVHNAKTKPCEEQYGSTYRCVSVLTVLHQDWLNGKEYKCKVSNKALPAPIEKTISKAKGQPREPQVYTLPPSREEMTKNQVSLTCLVKGFYPSDIAVEWESNGQPENNYKTTPPVLDSDGSFFLYSKLTVDKSRWQQGNVFSCSVMHEALHNHYTQKSLSLSPGGGGSGGGGSGGGGSGGGGSGGGGSGGGGSDKTHTCPPCPAPELLGGPSVFLFPPKPKDTLMISRTPEVTCVVVDVSHEDPEVKFNWYVDGVEVHNAKTKPCEEQYGSTYRCVSVLTVLHQDWLNGKEYKCKVSNKALPAPIEKTISKAKGQPREPQVYTLPPSREEMTKNQVSLTCLVKGFYPSDIAVEWESNGQPENNYKTTPPVLDSDGSFFLYSKLTVDKSRWQQGNVFSCSVMHEALHNHYTQKSLSLSPGK

SEQ ID NO: 2328 - protein, 982 aa, Artificial Sequence
  Synthetic
QVQLQESGPGLVKPSETLSLTCTVSGGSISSYYWSWIRQPPGKCLEWIGYVYYSGTTNYNPSLKSRVTISVDTSKNQFSLKLSSVTAADTAVYYCASIAVTGFYFDYWGQGTLVTVSSGGGGSGGGGSGGGGSEIVLTQSPGTLSLSPGERVTLSCRASQRVNNNYLAWYQQRPGQAPRLLIYGASSRATGIPDRFSGSGSGTDFTLTISRLEPEDFAVYYCQQYDRSPLTFGCGTKLEIKSGGGGSEVQLVESGGGLVQPGGSLKLSCAASGFTFNKYAINWVREAPGKGLEWVARIRSKYNNYATYYADAVKDRFTISRDDSKNTAYLQMNNLKTEDTAVYYCVRNANFGTSYISYFAYWGQGTLVTVSSGGGGSGGGGSGGGGSQTVVTQEPSLTVSPGGTVTLTCGSSTGAVTSGNYPNWVQKKPGQAPRGLIGGTKFLAPGTPARFSGSLLGGKAALTLSGVQPEDEAEYYCVLWYSNRWVFGSGTKLTVLGGGGDKTHTCPPCPAPELLGGPSVFLFPPKPKDTLMISRTPEVTCVVVDVSHEDPEVKFNWYVDGVEVHNAKTKPCEEQYGSTYRCVSVLTVLHQDWLNGKEYKCKVSNKALPAPIEKTISKAKGQPREPQVYTLPPSREEMTKNQVSLTCLVKGFYPSDIAVEWESNGQPENNYKTTPPVLDSDGSFFLYSKLTVDKSRWQQGNVFSCSVMHEALHNHYTQKSLSLSPGGGGSGGGGSGGGGSGGGGSGGGGSGGGGSDKTHTCPPCPAPELLGGPSVFLFPPKPKDTLMISRTPEVTCVVVDVSHEDPEVKFNWYVDGVEVHNAKTKPCEEQYGSTYRCVSVLTVLHQDWLNGKEYKCKVSNKALPAPIEKTISKAKGQPREPQVYTLPPSREEMTKNQVSLTCLVKGFYPSDIAVEWESNGQPENNYKTTPPVLDSDGSFFLYSKLTVDKSRWQQGNVFSCSVMHEALHNHYTQKSLSLSPGK

SEQ ID NO: 2329 - protein, 5 aa, Artificial Sequence
  Synthetic
NYGMH

SEQ ID NO: 2330 - protein, 17 aa, Artificial Sequence
  Synthetic
VIWYDGSDKYYADSVRG

SEQ ID NO: 2331 - protein, 15 aa, Artificial Sequence
  Synthetic
DGYDILTGNPRDFDY

SEQ ID NO: 2332 - protein, 16 aa, Artificial Sequence
  Synthetic
RSSQSLVHSDGNTYLS

SEQ ID NO: 2333 - protein, 7 aa, Artificial Sequence
  Synthetic
RISRRFS

SEQ ID NO: 2334 - protein, 9 aa, Artificial Sequence
  Synthetic
MQSTHVPRT

SEQ ID NO: 2335 - protein, 124 aa, Artificial Sequence
  Synthetic
QVQLVESGGGVVQSGRSLRLSCAASGFTFRNYGMHWVRQAPGKCLEWVAVIWYDGSDKYYADSVRGRFTISRDNSKNTLYLQMNSLRAEDTAVYYCARDGYDILTGNPRDFDYWGQGTLVTVSS

SEQ ID NO: 2336 - protein, 112 aa, Artificial Sequence
  Synthetic
DTVMTQTPLSSHVTLGQPASISCRSSQSLVHSDGNTYLSWLQQRPGQPPRLLIYRISRRFSGVPDRFSGSGAGTDFTLEISRVEAEDVGVYYCMQSTHVPRTFGCGTKVEIK

SEQ ID NO: 2337 - protein, 506 aa, Artificial Sequence
  Synthetic
QVQLVESGGGVVQSGRSLRLSCAASGFTFRNYGMHWVRQAPGKCLEWVAVIWYDGSDKYYADSVRGRFTISRDNSKNTLYLQMNSLRAEDTAVYYCARDGYDILTGNPRDFDYWGQGTLVTVSSGGGGSGGGGSGGGGSDTVMTQTPLSSHVTLGQPASISCRSSQSLVHSDGNTYLSWLQQRPGQPPRLLIYRISRRFSGVPDRFSGSGAGTDFTLEISRVEAEDVGVYYCMQSTHVPRTFGCGTKVEIKSGGGGSEVQLVESGGGLVQPGGSLKLSCAASGFTFNKYAMNWVRQAPGKGLEWVARIRSKYNNYATYYADSVKDRFTISRDDSKNTAYLQMNNLKTEDTAVYYCVRHGNFGNSYISYWAYWGQGTLVTVSSGGGGSGGGGSGGGGSQTVVTQEPSLTVSPGGTVTLTCGSSTGAVTSGNYPNWVQQKPGQAPRGLIGGTKFLAPGTPARFSGSLLGGKAALTLSGVQPEDEAEYYCVLWYSNRWVFGGGTKLTVL

SEQ ID NO: 2338 - protein, 506 aa, Artificial Sequence
  Synthetic
QVQLVESGGGVVQSGRSLRLSCAASGFTFRNYGMHWVRQAPGKCLEWVAVIWYDGSDKYYADSVRGRFTISRDNSKNTLYLQMNSLRAEDTAVYYCARDGYDILTGNPRDFDYWGQGTLVTVSSGGGGSGGGGSGGGGSDTVMTQTPLSSHVTLGQPASISCRSSQSLVHSDGNTYLSWLQQRPGQPPRLLIYRISRRFSGVPDRFSGSGAGTDFTLEISRVEAEDVGVYYCMQSTHVPRTFGCGTKVEIKSGGGGSEVQLVESGGGLVQPGGSLKLSCAASGFTFNKYAINWVRQAPGKGLEWVARIRSKYNNYATYYADAVKDRFTISRDDSKNTVYLQMNNLKTEDTAVYYCARAGNFGSSYISYWAYWGQGTLVTVSSGGGGSGGGGSGGGGSQTVVTQEPSLTVSPGGTVTITCGSSTGAVTSGNYPNWVQKKPGQAPRGLIGGTKFLAPGTPARFSGSLSGGKAALTLSGVQPEDEAEYYCVLWYSNRWVFGSGTKLTVL

SEQ ID NO: 2339 - protein, 506 aa, Artificial Sequence
  Synthetic
QVQLVESGGGVVQSGRSLRLSCAASGFTFRNYGMHWVRQAPGKCLEWVAVIWYDGSDKYYADSVRGRFTISRDNSKNTLYLQMNSLRAEDTAVYYCARDGYDILTGNPRDFDYWGQGTLVTVSSGGGGSGGGGSGGGGSDTVMTQTPLSSHVTLGQPASISCRSSQSLVHSDGNTYLSWLQQRPGQPPRLLIYRISRRFSGVPDRFSGSGAGTDFTLEISRVEAEDVGVYYCMQSTHVPRTFGCGTKVEIKSGGGGSEVQLVESGGGLVQPGGSLKLSCAASGFTFNKYAMNWVRQAPGKGLEWVARIRSKYNNYATYYAEAVKGRFTISRDDSKNTVYLQMNNLKTEDTAVYYCVRNENIGTSYISYWAYWGQGTLVTVSSGGGGSGGGGSGGGGSQTVVTQEPSLTVSPGGTVTITCGSSTGAVTSGNYPNWVQQKPGQAPRGLIGGTKFLAPGTPARFSGSLSGGKAALTLSGVQPEDEAEYYCVLWYSNRWVFGSGTKLTVL

SEQ ID NO: 2340 - protein, 506 aa, Artificial Sequence
  Synthetic
QVQLVESGGGVVQSGRSLRLSCAASGFTFRNYGMHWVRQAPGKCLEWVAVIWYDGSDKYYADSVRGRFTISRDNSKNTLYLQMNSLRAEDTAVYYCARDGYDILTGNPRDFDYWGQGTLVTVSSGGGGSGGGGSGGGGSDTVMTQTPLSSHVTLGQPASISCRSSQSLVHSDGNTYLSWLQQRPGQPPRLLIYRISRRFSGVPDRFSGSGAGTDFTLEISRVEAEDVGVYYCMQSTHVPRTFGCGTKVEIKSGGGGSEVQLVESGGGLVQPGGSLKLSCAASGFTFNKYAMNWVRQAPGKGMEWVARIRSKYNNYATYYADAVKDRFTISRDDSKNTLYLQMNNLKTEDTAVYYCVRAGNFGSSYISYFAYWGQGTLVTVSSGGGGSGGGGSGGGGSQTVVTQEPSLTVSPGGTVTITCGSSTGAVTSGNYPNWIQKKPGQAPRGLIGGTKFLAPGTPARFSGSLEGGKAALTLSGVQPEDEAEYYCVLYYSNRWVFGSGTKLTVL

SEQ ID NO: 2341 - protein, 506 aa, Artificial Sequence
  Synthetic
QVQLVESGGGVVQSGRSLRLSCAASGFTFRNYGMHWVRQAPGKCLEWVAVIWYDGSDKYYADSVRGRFTISRDNSKNTLYLQMNSLRAEDTAVYYCARDGYDILTGNPRDFDYWGQGTLVTVSSGGGGSGGGGSGGGGSDTVMTQTPLSSHVTLGQPASISCRSSQSLVHSDGNTYLSWLQQRPGQPPRLLIYRISRRFSGVPDRFSGSGAGTDFTLEISRVEAEDVGVYYCMQSTHVPRTFGCGTKVEIKSGGGGSEVQLVESGGGLVQPGGSLKLSCAASGFTFNKYAMNWVRQAPGKGMEWVARIRSKYNNYATYYADAVKDRFTISRDDSKNTLYLQMNNLKTEDTAVYYCVRAGNFGTSYISYWAYWGQGTLVTVSSGGGGSGGGGSGGGGSQTVVTQEPSLTVSPGGTVTITCGSSTGAVTSGNYPNWVQKKPGQAPRGLIGGTKFLAPGTPARFSGSLSGGKAALTLSGVQPEDEAEYYCVLWYSNRWVFGSGTKLTVL

SEQ ID NO: 2342 - protein, 506 aa, Artificial Sequence
  Synthetic
QVQLVESGGGVVQSGRSLRLSCAASGFTFRNYGMHWVRQAPGKCLEWVAVIWYDGSDKYYADSVRGRFTISRDNSKNTLYLQMNSLRAEDTAVYYCARDGYDILTGNPRDFDYWGQGTLVTVSSGGGGSGGGGSGGGGSDTVMTQTPLSSHVTLGQPASISCRSSQSLVHSDGNTYLSWLQQRPGQPPRLLIYRISRRFSGVPDRFSGSGAGTDFTLEISRVEAEDVGVYYCMQSTHVPRTFGCGTKVEIKSGGGGSEVQLVESGGGLVQPGGSLKLSCAASGFTFNKYAINWVREAPGKGLEWVARIRSKYNNYATYYADAVKDRFTISRDDSKNTAYLQMNNLKTEDTAVYYCVRNANFGTSYISYFAYWGQGTLVTVSSGGGGSGGGGSGGGGSQTVVTQEPSLTVSPGGTVTLTCGSSTGAVTSGNYPNWVQKKPGQAPRGLIGGTKFLAPGTPARFSGSLLGGKAALTLSGVQPEDEAEYYCVLWYSNRWVFGSGTKLTVL

SEQ ID NO: 2343 - protein, 7 aa, Artificial Sequence
  Synthetic
NARMGVS

SEQ ID NO: 2344 - protein, 16 aa, Artificial Sequence
  Synthetic
HIFSNDEKSYSTSLKN

SEQ ID NO: 2345 - protein, 14 aa, Artificial Sequence
  Synthetic
IVGYGSGWYGFFDY

SEQ ID NO: 2346 - protein, 11 aa, Artificial Sequence
  Synthetic
RASQGIRNDLG

SEQ ID NO: 2347 - protein, 7 aa, Artificial Sequence
  Synthetic
AASTLQS

SEQ ID NO: 2348 - protein, 9 aa, Artificial Sequence
  Synthetic
LQHNSYPLT

SEQ ID NO: 2349 - protein, 124 aa, Artificial Sequence
  Synthetic
QVTLKESGPTLVKPTETLTLTCTLSGFSLNNARMGVSWIRQPPGKCLEWLAHIFSNDEKSYSTSLKNRLTISKDSSKTQVVLTMTNVDPVDTATYYCARIVGYGSGWYGFFDYWGQGTLVTVSS

SEQ ID NO: 2350 - protein, 107 aa, Artificial Sequence
  Synthetic
DIQMTQSPSSLSASVGDRVTITCRASQGIRNDLGWYQQKPGKAPKRLIYAASTLQSGVPSRFSGSGSGTEFTLTISSLQPEDFATYYCLQHNSYPLTFGCGTKVEIK

SEQ ID NO: 2351 - protein, 107 aa, Artificial Sequence
  Synthetic
EIQMTQSPSSLSASVGDRVTITCRASQGIRNDLGWYQQKPGKAPKRLIYAASTLQSGVPSRFSGSGSGTEFTLTISSLQPEDFATYYCLQHNSYPLTFGCGTKVEIK

SEQ ID NO: 2352 - protein, 989 aa, Artificial Sequence
  Synthetic
QVTLKESGPTLVKPTETLTLTCTLSGFSLNNARMGVSWIRQPPGKCLEWLAHIFSNDEKSYSTSLKNRLTISKDSSKTQVVLTMTNVDPVDTATYYCARIVGYGSGWYGFFDYWGQGTLVTVSSGGGGSGGGGSGGGGSDIQMTQSPSSLSASVGDRVTITCRASQGIRNDLGWYQQKPGKAPKRLIYAASTLQSGVPSRFSGSGSGTEFTLTISSLQPEDFATYYCLQHNSYPLTFGCGTKVEIKSGGGGSEVQLVESGGGLVQPGGSLKLSCAASGFTFNKYAMNWVRQAPGKGLEWVARIRSKYNNYATYYADSVKDRFTISRDDSKNTAYLQMNNLKTEDTAVYYCVRHGNFGNSYISYWAYWGQGTLVTVSSGGGGSGGGGSGGGGSQTVVTQEPSLTVSPGGTVTLTCGSSTGAVTSGNYPNWVQQKPGQAPRGLIGGTKFLAPGTPARFSGSLLGGKAALTLSGVQPEDEAEYYCVLWYSNRWVFGGGTKLTVLGGGGDKTHTCPPCPAPELLGGPSVFLFPPKPKDTLMISRTPEVTCVVVDVSHEDPEVKFNWYVDGVEVHNAKTKPCEEQYGSTYRCVSVLTVLHQDWLNGKEYKCKVSNKALPAPIEKTISKAKGQPREPQVYTLPPSREEMTKNQVSLTCLVKGFYPSDIAVEWESNGQPENNYKTTPPVLDSDGSFFLYSKLTVDKSRWQQGNVFSCSVMHEALHNHYTQKSLSLSPGKGGGGSGGGGSGGGGSGGGGSGGGGSGGGGSDKTHTCPPCPAPELLGGPSVFLFPPKPKDTLMISRTPEVTCVVVDVSHEDPEVKFNWYVDGVEVHNAKTKPCEEQYGSTYRCVSVLTVLHQDWLNGKEYKCKVSNKALPAPIEKTISKAKGQPREPQVYTLPPSREEMTKNQVSLTCLVKGFYPSDIAVEWESNGQPENNYKTTPPVLDSDGSFFLYSKLTVDKSRWQQGNVFSCSVMHEALHNHYTQKSLSLSPGK

SEQ ID NO: 2353 - protein, 989 aa, Artificial Sequence
  Synthetic
QVTLKESGPTLVKPTETLTLTCTLSGFSLNNARMGVSWIRQPPGKCLEWLAHIFSNDEKSYSTSLKNRLTISKDSSKTQVVLTMTNVDPVDTATYYCARIVGYGSGWYGFFDYWGQGTLVTVSSGGGGSGGGGSGGGGSDIQMTQSPSSLSASVGDRVTITCRASQGIRNDLGWYQQKPGKAPKRLIYAASTLQSGVPSRFSGSGSGTEFTLTISSLQPEDFATYYCLQHNSYPLTFGCGTKVEIKSGGGGSEVQLVESGGGLVQPGGSLKLSCAASGFTFNKYAINWVRQAPGKGLEWVARIRSKYNNYATYYADAVKDRFTISRDDSKNTVYLQMNNLKTEDTAVYYCARAGNFGSSYISYWAYWGQGTLVTVSSGGGGSGGGGSGGGGSQTVVTQEPSLTVSPGGTVTITCGSSTGAVTSGNYPNWVQKKPGQAPRGLIGGTKFLAPGTPARFSGSLSGGKAALTLSGVQPEDEAEYYCVLWYSNRWVFGSGTKLTVLGGGGDKTHTCPPCPAPELLGGPSVFLFPPKPKDTLMISRTPEVTCVVVDVSHEDPEVKFNWYVDGVEVHNAKTKPCEEQYGSTYRCVSVLTVLHQDWLNGKEYKCKVSNKALPAPIEKTISKAKGQPREPQVYTLPPSREEMTKNQVSLTCLVKGFYPSDIAVEWESNGQPENNYKTTPPVLDSDGSFFLYSKLTVDKSRWQQGNVFSCSVMHEALHNHYTQKSLSLSPGKGGGGSGGGGSGGGGSGGGGSGGGGSGGGGSDKTHTCPPCPAPELLGGPSVFLFPPKPKDTLMISRTPEVTCVVVDVSHEDPEVKFNWYVDGVEVHNAKTKPCEEQYGSTYRCVSVLTVLHQDWLNGKEYKCKVSNKALPAPIEKTISKAKGQPREPQVYTLPPSREEMTKNQVSLTCLVKGFYPSDIAVEWESNGQPENNYKTTPPVLDSDGSFFLYSKLTVDKSRWQQGNVFSCSVMHEALHNHYTQKSLSLSPGK

SEQ ID NO: 2354 - protein, 989 aa, Artificial Sequence
  Synthetic
QVTLKESGPTLVKPTETLTLTCTLSGFSLNNARMGVSWIRQPPGKCLEWLAHIFSNDEKSYSTSLKNRLTISKDSSKTQVVLTMTNVDPVDTATYYCARIVGYGSGWYGFFDYWGQGTLVTVSSGGGGSGGGGSGGGGSDIQMTQSPSSLSASVGDRVTITCRASQGIRNDLGWYQQKPGKAPKRLIYAASTLQSGVPSRFSGSGSGTEFTLTISSLQPEDFATYYCLQHNSYPLTFGCGTKVEIKSGGGGSEVQLVESGGGLVQPGGSLKLSCAASGFTFNKYAMNWVRQAPGKGLEWVARIRSKYNNYATYYAEAVKGRFTISRDDSKNTVYLQMNNLKTEDTAVYYCVRNENIGTSYISYWAYWGQGTLVTVSSGGGGSGGGGSGGGGSQTVVTQEPSLTVSPGGTVTITCGSSTGAVTSGNYPNWVQQKPGQAPRGLIGGTKFLAPGTPARFSGSLSGGKAALTLSGVQPEDEAEYYCVLWYSNRWVFGSGTKLTVLGGGGDKTHTCPPCPAPELLGGPSVFLFPPKPKDTLMISRTPEVTCVVVDVSHEDPEVKFNWYVDGVEVHNAKTKPCEEQYGSTYRCVSVLTVLHQDWLNGKEYKCKVSNKALPAPIEKTISKAKGQPREPQVYTLPPSREEMTKNQVSLTCLVKGFYPSDIAVEWESNGQPENNYKTTPPVLDSDGSFFLYSKLTVDKSRWQQGNVFSCSVMHEALHNHYTQKSLSLSPGKGGGGSGGGGSGGGGSGGGGSGGGGSGGGGSDKTHTCPPCPAPELLGGPSVFLFPPKPKDTLMISRTPEVTCVVVDVSHEDPEVKFNWYVDGVEVHNAKTKPCEEQYGSTYRCVSVLTVLHQDWLNGKEYKCKVSNKALPAPIEKTISKAKGQPREPQVYTLPPSREEMTKNQVSLTCLVKGFYPSDIAVEWESNGQPENNYKTTPPVLDSDGSFFLYSKLTVDKSRWQQGNVFSCSVMHEALHNHYTQKSLSLSPGK

SEQ ID NO: 2355 - protein, 989 aa, Artificial Sequence
  Synthetic
QVTLKESGPTLVKPTETLTLTCTLSGFSLNNARMGVSWIRQPPGKCLEWLAHIFSNDEKSYSTSLKNRLTISKDSSKTQVVLTMTNVDPVDTATYYCARIVGYGSGWYGFFDYWGQGTLVTVSSGGGGSGGGGSGGGGSDIQMTQSPSSLSASVGDRVTITCRASQGIRNDLGWYQQKPGKAPKRLIYAASTLQSGVPSRFSGSGSGTEFTLTISSLQPEDFATYYCLQHNSYPLTFGCGTKVEIKSGGGGSEVQLVESGGGLVQPGGSLKLSCAASGFTFNKYAMNWVRQAPGKGMEWVARIRSKYNNYATYYADAVKDRFTISRDDSKNTLYLQMNNLKTEDTAVYYCVRAGNFGSSYISYFAYWGQGTLVTVSSGGGGSGGGGSGGGGSQTVVTQEPSLTVSPGGTVTITCGSSTGAVTSGNYPNWIQKKPGQAPRGLIGGTKFLAPGTPARFSGSLEGGKAALTLSGVQPEDEAEYYCVLYYSNRWVFGSGTKLTVLGGGGDKTHTCPPCPAPELLGGPSVFLFPPKPKDTLMISRTPEVTCVVVDVSHEDPEVKFNWYVDGVEVHNAKTKPCEEQYGSTYRCVSVLTVLHQDWLNGKEYKCKVSNKALPAPIEKTISKAKGQPREPQVYTLPPSREEMTKNQVSLTCLVKGFYPSDIAVEWESNGQPENNYKTTPPVLDSDGSFFLYSKLTVDKSRWQQGNVFSCSVMHEALHNHYTQKSLSLSPGKGGGGSGGGGSGGGGSGGGGSGGGGSGGGGSDKTHTCPPCPAPELLGGPSVFLFPPKPKDTLMISRTPEVTCVVVDVSHEDPEVKFNWYVDGVEVHNAKTKPCEEQYGSTYRCVSVLTVLHQDWLNGKEYKCKVSNKALPAPIEKTISKAKGQPREPQVYTLPPSREEMTKNQVSLTCLVKGFYPSDIAVEWESNGQPENNYKTTPPVLDSDGSFFLYSKLTVDKSRWQQGNVFSCSVMHEALHNHYTQKSLSLSPGK

SEQ ID NO: 2356 - protein, 989 aa, Artificial Sequence
  Synthetic
QVTLKESGPTLVKPTETLTLTCTLSGFSLNNARMGVSWIRQPPGKCLEWLAHIFSNDEKSYSTSLKNRLTISKDSSKTQVVLTMTNVDPVDTATYYCARIVGYGSGWYGFFDYWGQGTLVTVSSGGGGSGGGGSGGGGSDIQMTQSPSSLSASVGDRVTITCRASQGIRNDLGWYQQKPGKAPKRLIYAASTLQSGVPSRFSGSGSGTEFTLTISSLQPEDFATYYCLQHNSYPLTFGCGTKVEIKSGGGGSEVQLVESGGGLVQPGGSLKLSCAASGFTFNKYAINWVREAPGKGLEWVARIRSKYNNYATYYADAVKDRFTISRDDSKNTAYLQMNNLKTEDTAVYYCVRNANFGTSYISYFAYWGQGTLVTVSSGGGGSGGGGSGGGGSQTVVTQEPSLTVSPGGTVTLTCGSSTGAVTSGNYPNWVQKKPGQAPRGLIGGTKFLAPGTPARFSGSLLGGKAALTLSGVQPEDEAEYYCVLWYSNRWVFGSGTKLTVLGGGGDKTHTCPPCPAPELLGGPSVFLFPPKPKDTLMISRTPEVTCVVVDVSHEDPEVKFNWYVDGVEVHNAKTKPCEEQYGSTYRCVSVLTVLHQDWLNGKEYKCKVSNKALPAPIEKTISKAKGQPREPQVYTLPPSREEMTKNQVSLTCLVKGFYPSDIAVEWESNGQPENNYKTTPPVLDSDGSFFLYSKLTVDKSRWQQGNVFSCSVMHEALHNHYTQKSLSLSPGKGGGGSGGGGSGGGGSGGGGSGGGGSGGGGSDKTHTCPPCPAPELLGGPSVFLFPPKPKDTLMISRTPEVTCVVVDVSHEDPEVKFNWYVDGVEVHNAKTKPCEEQYGSTYRCVSVLTVLHQDWLNGKEYKCKVSNKALPAPIEKTISKAKGQPREPQVYTLPPSREEMTKNQVSLTCLVKGFYPSDIAVEWESNGQPENNYKTTPPVLDSDGSFFLYSKLTVDKSRWQQGNVFSCSVMHEALHNHYTQKSLSLSPGK

SEQ ID NO: 2357 - protein, 989 aa, Artificial Sequence
  Synthetic
QVTLKESGPTLVKPTETLTLTCTLSGFSLNNARMGVSWIRQPPGKCLEWLAHIFSNDEKSYSTSLKNRLTISKDSSKTQVVLTMTNVDPVDTATYYCARIVGYGSGWYGFFDYWGQGTLVTVSSGGGGSGGGGSGGGGSDIQMTQSPSSLSASVGDRVTITCRASQGIRNDLGWYQQKPGKAPKRLIYAASTLQSGVPSRFSGSGSGTEFTLTISSLQPEDFATYYCLQHNSYPLTFGCGTKVEIKSGGGGSEVQLVESGGGLVQPGGSLKLSCAASGFTFNKYAMNWVRQAPGKGMEWVARIRSKYNNYATYYADAVKDRFTISRDDSKNTLYLQMNNLKTEDTAVYYCVRAGNFGTSYISYWAYWGQGTLVTVSSGGGGSGGGGSGGGGSQTVVTQEPSLTVSPGGTVTITCGSSTGAVTSGNYPNWVQKKPGQAPRGLIGGTKFLAPGTPARFSGSLSGGKAALTLSGVQPEDEAEYYCVLWYSNRWVFGSGTKLTVLGGGGDKTHTCPPCPAPELLGGPSVFLFPPKPKDTLMISRTPEVTCVVVDVSHEDPEVKFNWYVDGVEVHNAKTKPCEEQYGSTYRCVSVLTVLHQDWLNGKEYKCKVSNKALPAPIEKTISKAKGQPREPQVYTLPPSREEMTKNQVSLTCLVKGFYPSDIAVEWESNGQPENNYKTTPPVLDSDGSFFLYSKLTVDKSRWQQGNVFSCSVMHEALHNHYTQKSLSLSPGKGGGGSGGGGSGGGGSGGGGSGGGGSGGGGSDKTHTCPPCPAPELLGGPSVFLFPPKPKDTLMISRTPEVTCVVVDVSHEDPEVKFNWYVDGVEVHNAKTKPCEEQYGSTYRCVSVLTVLHQDWLNGKEYKCKVSNKALPAPIEKTISKAKGQPREPQVYTLPPSREEMTKNQVSLTCLVKGFYPSDIAVEWESNGQPENNYKTTPPVLDSDGSFFLYSKLTVDKSRWQQGNVFSCSVMHEALHNHYTQKSLSLSPGK

SEQ ID NO: 2358 - protein, 5 aa, Artificial Sequence
  Synthetic
NAWMS

SEQ ID NO: 2359 - protein, 19 aa, Artificial Sequence
  Synthetic
RIRSRSYGGTTDYAAPVKG

SEQ ID NO: 2360 - protein, 16 aa, Artificial Sequence
  Synthetic
PSYSGSYYNYFSVMDV

SEQ ID NO: 2361 - protein, 11 aa, Artificial Sequence
  Synthetic
RTSQSISSYLN

SEQ ID NO: 2362 - protein, 7 aa, Artificial Sequence
  Synthetic
AASSLQG

SEQ ID NO: 2363 - protein, 9 aa, Artificial Sequence
  Synthetic
QQTYSMPFT

SEQ ID NO: 2364 - protein, 127 aa, Artificial Sequence
  Synthetic
EVQLVESGGGLVQPGGSLRLSCAASGFTFSNAWMSWVRQAPGKCLEWVGRIRSRSYGGTTDYAAPVKGRFTISRDDSKNTLFLQMNSLKTEDTAVYYCTTPSYSGSYYNYFSVMDVWGQGTTVTVSS

SEQ ID NO: 2365 - protein, 107 aa, Artificial Sequence
  Synthetic
DIQMTQSPSSLSASVGDRVTITCRTSQSISSYLNWYQQKPGRAPKLLIFAASSLQGGVPSRFSGSGSGTDFTLTISSLQPEDFATYYCQQTYSMPFTFGCGTKVEIK

SEQ ID NO: 2366 - protein, 107 aa, Artificial Sequence
  Synthetic
EIQMTQSPSSLSASVGDRVTITCRTSQSISSYLNWYQQKPGRAPKLLIFAASSLQGGVPSRFSGSGSGTDFTLTISSLQPEDFATYYCQQTYSMPFTFGCGTKVEIK

SEQ ID NO: 2367 - protein, 992 aa, Artificial Sequence
  Synthetic
EVQLVESGGGLVQPGGSLRLSCAASGFTFSNAWMSWVRQAPGKCLEWVGRIRSRSYGGTTDYAAPVKGRFTISRDDSKNTLFLQMNSLKTEDTAVYYCTTPSYSGSYYNYFSVMDVWGQGTTVTVSSGGGGSGGGGSGGGGSDIQMTQSPSSLSASVGDRVTITCRTSQSISSYLNWYQQKPGRAPKLLIFAASSLQGGVPSRFSGSGSGTDFTLTISSLQPEDFATYYCQQTYSMPFTFGCGTKVEIKSGGGGSEVQLVESGGGLVQPGGSLKLSCAASGFTFNKYAMNWVRQAPGKGLEWVARIRSKYNNYATYYADSVKDRFTISRDDSKNTAYLQMNNLKTEDTAVYYCVRHGNFGNSYISYWAYWGQGTLVTVSSGGGGSGGGGSGGGGSQTVVTQEPSLTVSPGGTVTLTCGSSTGAVTSGNYPNWVQQKPGQAPRGLIGGTKFLAPGTPARFSGSLLGGKAALTLSGVQPEDEAEYYCVLWYSNRWVFGGGTKLTVLGGGGDKTHTCPPCPAPELLGGPSVFLFPPKPKDTLMISRTPEVTCVVVDVSHEDPEVKFNWYVDGVEVHNAKTKPCEEQYGSTYRCVSVLTVLHQDWLNGKEYKCKVSNKALPAPIEKTISKAKGQPREPQVYTLPPSREEMTKNQVSLTCLVKGFYPSDIAVEWESNGQPENNYKTTPPVLDSDGSFFLYSKLTVDKSRWQQGNVFSCSVMHEALHNHYTQKSLSLSPGKGGGGSGGGGSGGGGSGGGGSGGGGSGGGGSDKTHTCPPCPAPELLGGPSVFLFPPKPKDTLMISRTPEVTCVVVDVSHEDPEVKFNWYVDGVEVHNAKTKPCEEQYGSTYRCVSVLTVLHQDWLNGKEYKCKVSNKALPAPIEKTISKAKGQPREPQVYTLPPSREEMTKNQVSLTCLVKGFYPSDIAVEWESNGQPENNYKTTPPVLDSDGSFFLYSKLTVDKSRWQQGNVFSCSVMHEALHNHYTQKSLSLSPGK

SEQ ID NO: 2368 - protein, 992 aa, Artificial Sequence
  Synthetic
EVQLVESGGGLVQPGGSLRLSCAASGFTFSNAWMSWVRQAPGKCLEWVGRIRSRSYGGTTDYAAPVKGRFTISRDDSKNTLFLQMNSLKTEDTAVYYCTTPSYSGSYYNYFSVMDVWGQGTTVTVSSGGGGSGGGGSGGGGSDIQMTQSPSSLSASVGDRVTITCRTSQSISSYLNWYQQKPGRAPKLLIFAASSLQGGVPSRFSGSGSGTDFTLTISSLQPEDFATYYCQQTYSMPFTFGCGTKVEIKSGGGGSEVQLVESGGGLVQPGGSLKLSCAASGFTFNKYAINWVRQAPGKGLEWVARIRSKYNNYATYYADAVKDRFTISRDDSKNTVYLQMNNLKTEDTAVYYCARAGNFGSSYISYWAYWGQGTLVTVSSGGGGSGGGGSGGGGSQTVVTQEPSLTVSPGGTVTITCGSSTGAVTSGNYPNWVQKKPGQAPRGLIGGTKFLAPGTPARFSGSLSGGKAALTLSGVQPEDEAEYYCVLWYSNRWVFGSGTKLTVLGGGGDKTHTCPPCPAPELLGGPSVFLFPPKPKDTLMISRTPEVTCVVVDVSHEDPEVKFNWYVDGVEVHNAKTKPCEEQYGSTYRCVSVLTVLHQDWLNGKEYKCKVSNKALPAPIEKTISKAKGQPREPQVYTLPPSREEMTKNQVSLTCLVKGFYPSDIAVEWESNGQPENNYKTTPPVLDSDGSFFLYSKLTVDKSRWQQGNVFSCSVMHEALHNHYTQKSLSLSPGKGGGGSGGGGSGGGGSGGGGSGGGGSGGGGSDKTHTCPPCPAPELLGGPSVFLFPPKPKDTLMISRTPEVTCVVVDVSHEDPEVKFNWYVDGVEVHNAKTKPCEEQYGSTYRCVSVLTVLHQDWLNGKEYKCKVSNKALPAPIEKTISKAKGQPREPQVYTLPPSREEMTKNQVSLTCLVKGFYPSDIAVEWESNGQPENNYKTTPPVLDSDGSFFLYSKLTVDKSRWQQGNVFSCSVMHEALHNHYTQKSLSLSPGK

SEQ ID NO: 2369 - protein, 992 aa, Artificial Sequence
  Synthetic
EVQLVESGGGLVQPGGSLRLSCAASGFTFSNAWMSWVRQAPGKCLEWVGRIRSRSYGGTTDYAAPVKGRFTISRDDSKNTLFLQMNSLKTEDTAVYYCTTPSYSGSYYNYFSVMDVWGQGTTVTVSSGGGGSGGGGSGGGGSDIQMTQSPSSLSASVGDRVTITCRTSQSISSYLNWYQQKPGRAPKLLIFAASSLQGGVPSRFSGSGSGTDFTLTISSLQPEDFATYYCQQTYSMPFTFGCGTKVEIKSGGGGSEVQLVESGGGLVQPGGSLKLSCAASGFTFNKYAMNWVRQAPGKGLEWVARIRSKYNNYATYYAEAVKGRFTISRDDSKNTVYLQMNNLKTEDTAVYYCVRNENIGTSYISYWAYWGQGTLVTVSSGGGGSGGGGSGGGGSQTVVTQEPSLTVSPGGTVTITCGSSTGAVTSGNYPNWVQQKPGQAPRGLIGGTKFLAPGTPARFSGSLSGGKAALTLSGVQPEDEAEYYCVLWYSNRWVFGSGTKLTVLGGGGDKTHTCPPCPAPELLGGPSVFLFPPKPKDTLMISRTPEVTCVVVDVSHEDPEVKFNWYVDGVEVHNAKTKPCEEQYGSTYRCVSVLTVLHQDWLNGKEYKCKVSNKALPAPIEKTISKAKGQPREPQVYTLPPSREEMTKNQVSLTCLVKGFYPSDIAVEWESNGQPENNYKTTPPVLDSDGSFFLYSKLTVDKSRWQQGNVFSCSVMHEALHNHYTQKSLSLSPGKGGGGSGGGGSGGGGSGGGGSGGGGSGGGGSDKTHTCPPCPAPELLGGPSVFLFPPKPKDTLMISRTPEVTCVVVDVSHEDPEVKFNWYVDGVEVHNAKTKPCEEQYGSTYRCVSVLTVLHQDWLNGKEYKCKVSNKALPAPIEKTISKAKGQPREPQVYTLPPSREEMTKNQVSLTCLVKGFYPSDIAVEWESNGQPENNYKTTPPVLDSDGSFFLYSKLTVDKSRWQQGNVFSCSVMHEALHNHYTQKSLSLSPGK

SEQ ID NO: 2370 - protein, 992 aa, Artificial Sequence
  Synthetic
EVQLVESGGGLVQPGGSLRLSCAASGFTFSNAWMSWVRQAPGKCLEWVGRIRSRSYGGTTDYAAPVKGRFTISRDDSKNTLFLQMNSLKTEDTAVYYCTTPSYSGSYYNYFSVMDVWGQGTTVTVSSGGGGSGGGGSGGGGSDIQMTQSPSSLSASVGDRVTITCRTSQSISSYLNWYQQKPGRAPKLLIFAASSLQGGVPSRFSGSGSGTDFTLTISSLQPEDFATYYCQQTYSMPFTFGCGTKVEIKSGGGGSEVQLVESGGGLVQPGGSLKLSCAASGFTFNKYAMNWVRQAPGKGMEWVARIRSKYNNYATYYADAVKDRFTISRDDSKNTLYLQMNNLKTEDTAVYYCVRAGNFGSSYISYFAYWGQGTLVTVSSGGGGSGGGGSGGGGSQTVVTQEPSLTVSPGGTVTITCGSSTGAVTSGNYPNWIQKKPGQAPRGLIGGTKFLAPGTPARFSGSLEGGKAALTLSGVQPEDEAEYYCVLYYSNRWVFGSGTKLTVLGGGGDKTHTCPPCPAPELLGGPSVFLFPPKPKDTLMISRTPEVTCVVVDVSHEDPEVKFNWYVDGVEVHNAKTKPCEEQYGSTYRCVSVLTVLHQDWLNGKEYKCKVSNKALPAPIEKTISKAKGQPREPQVYTLPPSREEMTKNQVSLTCLVKGFYPSDIAVEWESNGQPENNYKTTPPVLDSDGSFFLYSKLTVDKSRWQQGNVFSCSVMHEALHNHYTQKSLSLSPGKGGGGSGGGGSGGGGSGGGGSGGGGSGGGGSDKTHTCPPCPAPELLGGPSVFLFPPKPKDTLMISRTPEVTCVVVDVSHEDPEVKFNWYVDGVEVHNAKTKPCEEQYGSTYRCVSVLTVLHQDWLNGKEYKCKVSNKALPAPIEKTISKAKGQPREPQVYTLPPSREEMTKNQVSLTCLVKGFYPSDIAVEWESNGQPENNYKTTPPVLDSDGSFFLYSKLTVDKSRWQQGNVFSCSVMHEALHNHYTQKSLSLSPGK

SEQ ID NO: 2371 - protein, 992 aa, Artificial Sequence
  Synthetic
EVQLVESGGGLVQPGGSLRLSCAASGFTFSNAWMSWVRQAPGKCLEWVGRIRSRSYGGTTDYAAPVKGRFTISRDDSKNTLFLQMNSLKTEDTAVYYCTTPSYSGSYYNYFSVMDVWGQGTTVTVSSGGGGSGGGGSGGGGSDIQMTQSPSSLSASVGDRVTITCRTSQSISSYLNWYQQKPGRAPKLLIFAASSLQGGVPSRFSGSGSGTDFTLTISSLQPEDFATYYCQQTYSMPFTFGCGTKVEIKSGGGGSEVQLVESGGGLVQPGGSLKLSCAASGFTFNKYAMNWVRQAPGKGMEWVARIRSKYNNYATYYADAVKDRFTISRDDSKNTLYLQMNNLKTEDTAVYYCVRAGNFGTSYISYWAYWGQGTLVTVSSGGGGSGGGGSGGGGSQTVVTQEPSLTVSPGGTVTITCGSSTGAVTSGNYPNWVQKKPGQAPRGLIGGTKFLAPGTPARFSGSLSGGKAALTLSGVQPEDEAEYYCVLWYSNRWVFGSGTKLTVLGGGGDKTHTCPPCPAPELLGGPSVFLFPPKPKDTLMISRTPEVTCVVVDVSHEDPEVKFNWYVDGVEVHNAKTKPCEEQYGSTYRCVSVLTVLHQDWLNGKEYKCKVSNKALPAPIEKTISKAKGQPREPQVYTLPPSREEMTKNQVSLTCLVKGFYPSDIAVEWESNGQPENNYKTTPPVLDSDGSFFLYSKLTVDKSRWQQGNVFSCSVMHEALHNHYTQKSLSLSPGKGGGGSGGGGSGGGGSGGGGSGGGGSGGGGSDKTHTCPPCPAPELLGGPSVFLFPPKPKDTLMISRTPEVTCVVVDVSHEDPEVKFNWYVDGVEVHNAKTKPCEEQYGSTYRCVSVLTVLHQDWLNGKEYKCKVSNKALPAPIEKTISKAKGQPREPQVYTLPPSREEMTKNQVSLTCLVKGFYPSDIAVEWESNGQPENNYKTTPPVLDSDGSFFLYSKLTVDKSRWQQGNVFSCSVMHEALHNHYTQKSLSLSPGK

SEQ ID NO: 2372 - protein, 992 aa, Artificial Sequence
  Synthetic
EVQLVESGGGLVQPGGSLRLSCAASGFTFSNAWMSWVRQAPGKCLEWVGRIRSRSYGGTTDYAAPVKGRFTISRDDSKNTLFLQMNSLKTEDTAVYYCTTPSYSGSYYNYFSVMDVWGQGTTVTVSSGGGGSGGGGSGGGGSDIQMTQSPSSLSASVGDRVTITCRTSQSISSYLNWYQQKPGRAPKLLIFAASSLQGGVPSRFSGSGSGTDFTLTISSLQPEDFATYYCQQTYSMPFTFGCGTKVEIKSGGGGSEVQLVESGGGLVQPGGSLKLSCAASGFTFNKYAINWVREAPGKGLEWVARIRSKYNNYATYYADAVKDRFTISRDDSKNTAYLQMNNLKTEDTAVYYCVRNANFGTSYISYFAYWGQGTLVTVSSGGGGSGGGGSGGGGSQTVVTQEPSLTVSPGGTVTLTCGSSTGAVTSGNYPNWVQKKPGQAPRGLIGGTKFLAPGTPARFSGSLLGGKAALTLSGVQPEDEAEYYCVLWYSNRWVFGSGTKLTVLGGGGDKTHTCPPCPAPELLGGPSVFLFPPKPKDTLMISRTPEVTCVVVDVSHEDPEVKFNWYVDGVEVHNAKTKPCEEQYGSTYRCVSVLTVLHQDWLNGKEYKCKVSNKALPAPIEKTISKAKGQPREPQVYTLPPSREEMTKNQVSLTCLVKGFYPSDIAVEWESNGQPENNYKTTPPVLDSDGSFFLYSKLTVDKSRWQQGNVFSCSVMHEALHNHYTQKSLSLSPGKGGGGSGGGGSGGGGSGGGGSGGGGSGGGGSDKTHTCPPCPAPELLGGPSVFLFPPKPKDTLMISRTPEVTCVVVDVSHEDPEVKFNWYVDGVEVHNAKTKPCEEQYGSTYRCVSVLTVLHQDWLNGKEYKCKVSNKALPAPIEKTISKAKGQPREPQVYTLPPSREEMTKNQVSLTCLVKGFYPSDIAVEWESNGQPENNYKTTPPVLDSDGSFFLYSKLTVDKSRWQQGNVFSCSVMHEALHNHYTQKSLSLSPGK

SEQ ID NO: 2373 - protein, 987 aa, Artificial Sequence
  Synthetic
QVTLKESGPGILQPSQTLSLTCSFSGFSLNTSGMNVGWIRQPSGKCLDWLAHIWWNDDKYYNPALKSRLTISKDTSNNQVFLKIASVVTADTATYYCVRSYFGDYVWYFDVWGAGTTVTVSSGGGGSGGGGSGGGGSDIQMTQTTSSLSASLGDRVTISCSASQGIHNYLNWYQQKPDGTVKLLIYYTSSLHSGVPSRFSGSGSGTDYSLTISNLEPEDIATYFCQQYSKLPRTFGCGTKLEIKSGGGGSEVQLVESGGGLVQPGGSLKLSCAASGFTFNKYAMNWVRQAPGKGLEWVARIRSKYNNYATYYADSVKDRFTISRDDSKNTAYLQMNNLKTEDTAVYYCVRHGNFGNSYISYWAYWGQGTLVTVSSGGGGSGGGGSGGGGSQTVVTQEPSLTVSPGGTVTLTCGSSTGAVTSGNYPNWVQQKPGQAPRGLIGGTKFLAPGTPARFSGSLLGGKAALTLSGVQPEDEAEYYCVLWYSNRWVFGGGTKLTVLGGGGDKTHTCPPCPAPELLGGPSVFLFPPKPKDTLMISRTPEVTCVVVDVSHEDPEVKFNWYVDGVEVHNAKTKPCEEQYGSTYRCVSVLTVLHQDWLNGKEYKCKVSNKALPAPIEKTISKAKGQPREPQVYTLPPSREEMTKNQVSLTCLVKGFYPSDIAVEWESNGQPENNYKTTPPVLDSDGSFFLYSKLTVDKSRWQQGNVFSCSVMHEALHNHYTQKSLSLSPGKGGGGSGGGGSGGGGSGGGGSGGGGSGGGGSDKTHTCPPCPAPELLGGPSVFLFPPKPKDTLMISRTPEVTCVVVDVSHEDPEVKFNWYVDGVEVHNAKTKPCEEQYGSTYRCVSVLTVLHQDWLNGKEYKCKVSNKALPAPIEKTISKAKGQPREPQVYTLPPSREEMTKNQVSLTCLVKGFYPSDIAVEWESNGQPENNYKTTPPVLDSDGSFFLYSKLTVDKSRWQQGNVFSCSVMHEALHNHYTQKSLSLSPGK

SEQ ID NO: 2374 - protein, 987 aa, Artificial Sequence
  Synthetic
QVTLKESGPGILQPSQTLSLTCSFSGFSLNTSGMNVGWIRQPSGKCLDWLAHIWWNDDKYYNPALKSRLTISKDTSNNQVFLKIASVVTADTATYYCVRSYFGDYVWYFDVWGAGTTVTVSSGGGGSGGGGSGGGGSDIQMTQTTSSLSASLGDRVTISCSASQGIHNYLNWYQQKPDGTVKLLIYYTSSLHSGVPSRFSGSGSGTDYSLTISNLEPEDIATYFCQQYSKLPRTFGCGTKLEIKSGGGGSEVQLVESGGGLVQPGGSLKLSCAASGFTFNKYAINWVRQAPGKGLEWVARIRSKYNNYATYYADAVKDRFTISRDDSKNTVYLQMNNLKTEDTAVYYCARAGNFGSSYISYWAYWGQGTLVTVSSGGGGSGGGGSGGGGSQTVVTQEPSLTVSPGGTVTITCGSSTGAVTSGNYPNWVQKKPGQAPRGLIGGTKFLAPGTPARFSGSLSGGKAALTLSGVQPEDEAEYYCVLWYSNRWVFGSGTKLTVLGGGGDKTHTCPPCPAPELLGGPSVFLFPPKPKDTLMISRTPEVTCVVVDVSHEDPEVKFNWYVDGVEVHNAKTKPCEEQYGSTYRCVSVLTVLHQDWLNGKEYKCKVSNKALPAPIEKTISKAKGQPREPQVYTLPPSREEMTKNQVSLTCLVKGFYPSDIAVEWESNGQPENNYKTTPPVLDSDGSFFLYSKLTVDKSRWQQGNVFSCSVMHEALHNHYTQKSLSLSPGKGGGGSGGGGSGGGGSGGGGSGGGGSGGGGSDKTHTCPPCPAPELLGGPSVFLFPPKPKDTLMISRTPEVTCVVVDVSHEDPEVKFNWYVDGVEVHNAKTKPCEEQYGSTYRCVSVLTVLHQDWLNGKEYKCKVSNKALPAPIEKTISKAKGQPREPQVYTLPPSREEMTKNQVSLTCLVKGFYPSDIAVEWESNGQPENNYKTTPPVLDSDGSFFLYSKLTVDKSRWQQGNVFSCSVMHEALHNHYTQKSLSLSPGK

SEQ ID NO: 2375 - protein, 987 aa, Artificial Sequence
  Synthetic
QVTLKESGPGILQPSQTLSLTCSFSGFSLNTSGMNVGWIRQPSGKCLDWLAHIWWNDDKYYNPALKSRLTISKDTSNNQVFLKIASVVTADTATYYCVRSYFGDYVWYFDVWGAGTTVTVSSGGGGSGGGGSGGGGSDIQMTQTTSSLSASLGDRVTISCSASQGIHNYLNWYQQKPDGTVKLLIYYTSSLHSGVPSRFSGSGSGTDYSLTISNLEPEDIATYFCQQYSKLPRTFGCGTKLEIKSGGGGSEVQLVESGGGLVQPGGSLKLSCAASGFTFNKYAMNWVRQAPGKGLEWVARIRSKYNNYATYYAEAVKGRFTISRDDSKNTVYLQMNNLKTEDTAVYYCVRNENIGTSYISYWAYWGQGTLVTVSSGGGGSGGGGSGGGGSQTVVTQEPSLTVSPGGTVTITCGSSTGAVTSGNYPNWVQQKPGQAPRGLIGGTKFLAPGTPARFSGSLSGGKAALTLSGVQPEDEAEYYCVLWYSNRWVFGSGTKLTVLGGGGDKTHTCPPCPAPELLGGPSVFLFPPKPKDTLMISRTPEVTCVVVDVSHEDPEVKFNWYVDGVEVHNAKTKPCEEQYGSTYRCVSVLTVLHQDWLNGKEYKCKVSNKALPAPIEKTISKAKGQPREPQVYTLPPSREEMTKNQVSLTCLVKGFYPSDIAVEWESNGQPENNYKTTPPVLDSDGSFFLYSKLTVDKSRWQQGNVFSCSVMHEALHNHYTQKSLSLSPGKGGGGSGGGGSGGGGSGGGGSGGGGSGGGGSDKTHTCPPCPAPELLGGPSVFLFPPKPKDTLMISRTPEVTCVVVDVSHEDPEVKFNWYVDGVEVHNAKTKPCEEQYGSTYRCVSVLTVLHQDWLNGKEYKCKVSNKALPAPIEKTISKAKGQPREPQVYTLPPSREEMTKNQVSLTCLVKGFYPSDIAVEWESNGQPENNYKTTPPVLDSDGSFFLYSKLTVDKSRWQQGNVFSCSVMHEALHNHYTQKSLSLSPGK

SEQ ID NO: 2376 - protein, 987 aa, Artificial Sequence
  Synthetic
QVTLKESGPGILQPSQTLSLTCSFSGFSLNTSGMNVGWIRQPSGKCLDWLAHIWWNDDKYYNPALKSRLTISKDTSNNQVFLKIASVVTADTATYYCVRSYFGDYVWYFDVWGAGTTVTVSSGGGGSGGGGSGGGGSDIQMTQTTSSLSASLGDRVTISCSASQGIHNYLNWYQQKPDGTVKLLIYYTSSLHSGVPSRFSGSGSGTDYSLTISNLEPEDIATYFCQQYSKLPRTFGCGTKLEIKSGGGGSEVQLVESGGGLVQPGGSLKLSCAASGFTFNKYAMNWVRQAPGKGMEWVARIRSKYNNYATYYADAVKDRFTISRDDSKNTLYLQMNNLKTEDTAVYYCVRAGNFGSSYISYFAYWGQGTLVTVSSGGGGSGGGGSGGGGSQTVVTQEPSLTVSPGGTVTITCGSSTGAVTSGNYPNWIQKKPGQAPRGLIGGTKFLAPGTPARFSGSLEGGKAALTLSGVQPEDEAEYYCVLYYSNRWVFGSGTKLTVLGGGGDKTHTCPPCPAPELLGGPSVFLFPPKPKDTLMISRTPEVTCVVVDVSHEDPEVKFNWYVDGVEVHNAKTKPCEEQYGSTYRCVSVLTVLHQDWLNGKEYKCKVSNKALPAPIEKTISKAKGQPREPQVYTLPPSREEMTKNQVSLTCLVKGFYPSDIAVEWESNGQPENNYKTTPPVLDSDGSFFLYSKLTVDKSRWQQGNVFSCSVMHEALHNHYTQKSLSLSPGKGGGGSGGGGSGGGGSGGGGSGGGGSGGGGSDKTHTCPPCPAPELLGGPSVFLFPPKPKDTLMISRTPEVTCVVVDVSHEDPEVKFNWYVDGVEVHNAKTKPCEEQYGSTYRCVSVLTVLHQDWLNGKEYKCKVSNKALPAPIEKTISKAKGQPREPQVYTLPPSREEMTKNQVSLTCLVKGFYPSDIAVEWESNGQPENNYKTTPPVLDSDGSFFLYSKLTVDKSRWQQGNVFSCSVMHEALHNHYTQKSLSLSPGK

SEQ ID NO: 2377 - protein, 987 aa, Artificial Sequence
  Synthetic
QVTLKESGPGILQPSQTLSLTCSFSGFSLNTSGMNVGWIRQPSGKCLDWLAHIWWNDDKYYNPALKSRLTISKDTSNNQVFLKIASVVTADTATYYCVRSYFGDYVWYFDVWGAGTTVTVSSGGGGSGGGGSGGGGSDIQMTQTTSSLSASLGDRVTISCSASQGIHNYLNWYQQKPDGTVKLLIYYTSSLHSGVPSRFSGSGSGTDYSLTISNLEPEDIATYFCQQYSKLPRTFGCGTKLEIKSGGGGSEVQLVESGGGLVQPGGSLKLSCAASGFTFNKYAMNWVRQAPGKGMEWVARIRSKYNNYATYYADAVKDRFTISRDDSKNTLYLQMNNLKTEDTAVYYCVRAGNFGTSYISYWAYWGQGTLVTVSSGGGGSGGGGSGGGGSQTVVTQEPSLTVSPGGTVTITCGSSTGAVTSGNYPNWVQKKPGQAPRGLIGGTKFLAPGTPARFSGSLSGGKAALTLSGVQPEDEAEYYCVLWYSNRWVFGSGTKLTVLGGGGDKTHTCPPCPAPELLGGPSVFLFPPKPKDTLMISRTPEVTCVVVDVSHEDPEVKFNWYVDGVEVHNAKTKPCEEQYGSTYRCVSVLTVLHQDWLNGKEYKCKVSNKALPAPIEKTISKAKGQPREPQVYTLPPSREEMTKNQVSLTCLVKGFYPSDIAVEWESNGQPENNYKTTPPVLDSDGSFFLYSKLTVDKSRWQQGNVFSCSVMHEALHNHYTQKSLSLSPGKGGGGSGGGGSGGGGSGGGGSGGGGSGGGGSDKTHTCPPCPAPELLGGPSVFLFPPKPKDTLMISRTPEVTCVVVDVSHEDPEVKFNWYVDGVEVHNAKTKPCEEQYGSTYRCVSVLTVLHQDWLNGKEYKCKVSNKALPAPIEKTISKAKGQPREPQVYTLPPSREEMTKNQVSLTCLVKGFYPSDIAVEWESNGQPENNYKTTPPVLDSDGSFFLYSKLTVDKSRWQQGNVFSCSVMHEALHNHYTQKSLSLSPGK

SEQ ID NO: 2378 - protein, 987 aa, Artificial Sequence
  Synthetic
QVTLKESGPGILQPSQTLSLTCSFSGFSLNTSGMNVGWIRQPSGKCLDWLAHIWWNDDKYYNPALKSRLTISKDTSNNQVFLKIASVVTADTATYYCVRSYFGDYVWYFDVWGAGTTVTVSSGGGGSGGGGSGGGGSDIQMTQTTSSLSASLGDRVTISCSASQGIHNYLNWYQQKPDGTVKLLIYYTSSLHSGVPSRFSGSGSGTDYSLTISNLEPEDIATYFCQQYSKLPRTFGCGTKLEIKSGGGGSEVQLVESGGGLVQPGGSLKLSCAASGFTFNKYAINWVREAPGKGLEWVARIRSKYNNYATYYADAVKDRFTISRDDSKNTAYLQMNNLKTEDTAVYYCVRNANFGTSYISYFAYWGQGTLVTVSSGGGGSGGGGSGGGGSQTVVTQEPSLTVSPGGTVTLTCGSSTGAVTSGNYPNWVQKKPGQAPRGLIGGTKFLAPGTPARFSGSLLGGKAALTLSGVQPEDEAEYYCVLWYSNRWVFGSGTKLTVLGGGGDKTHTCPPCPAPELLGGPSVFLFPPKPKDTLMISRTPEVTCVVVDVSHEDPEVKFNWYVDGVEVHNAKTKPCEEQYGSTYRCVSVLTVLHQDWLNGKEYKCKVSNKALPAPIEKTISKAKGQPREPQVYTLPPSREEMTKNQVSLTCLVKGFYPSDIAVEWESNGQPENNYKTTPPVLDSDGSFFLYSKLTVDKSRWQQGNVFSCSVMHEALHNHYTQKSLSLSPGKGGGGSGGGGSGGGGSGGGGSGGGGSGGGGSDKTHTCPPCPAPELLGGPSVFLFPPKPKDTLMISRTPEVTCVVVDVSHEDPEVKFNWYVDGVEVHNAKTKPCEEQYGSTYRCVSVLTVLHQDWLNGKEYKCKVSNKALPAPIEKTISKAKGQPREPQVYTLPPSREEMTKNQVSLTCLVKGFYPSDIAVEWESNGQPENNYKTTPPVLDSDGSFFLYSKLTVDKSRWQQGNVFSCSVMHEALHNHYTQKSLSLSPGK

SEQ ID NO: 2379 - protein, 7 aa, Artificial Sequence
  Synthetic
TSGMNVG

SEQ ID NO: 2380 - protein, 16 aa, Artificial Sequence
  Synthetic
HIWWNDDKYYNPALKS

SEQ ID NO: 2381 - protein, 12 aa, Artificial Sequence
  Synthetic
SYFGDYVWYFDV

SEQ ID NO: 2382 - protein, 11 aa, Artificial Sequence
  Synthetic
SASQGIHNYLN

SEQ ID NO: 2383 - protein, 7 aa, Artificial Sequence
  Synthetic
YTSSLHS

SEQ ID NO: 2384 - protein, 9 aa, Artificial Sequence
  Synthetic
QQYSKLPRT

SEQ ID NO: 2385 - protein, 122 aa, Artificial Sequence
  Synthetic
QVTLKESGPGILQPSQTLSLTCSFSGFSLNTSGMNVGWIRQPSGKCLDWLAHIWWNDDKYYNPALKSRLTISKDTSNNQVFLKIASVVTADTATYYCVRSYFGDYVWYFDVWGAGTTVTVSS

SEQ ID NO: 2386 - protein, 107 aa, Artificial Sequence
  Synthetic
DIQMTQTTSSLSASLGDRVTISCSASQGIHNYLNWYQQKPDGTVKLLIYYTSSLHSGVPSRFSGSGSGTDYSLTISNLEPEDIATYFCQQYSKLPRTFGCGTKLEIK

SEQ ID NO: 2387 - protein, 107 aa, Artificial Sequence
  Synthetic
EIQMTQTTSSLSASLGDRVTISCSASQGIHNYLNWYQQKPDGTVKLLIYYTSSLHSGVPSRFSGSGSGTDYSLTISNLEPEDIATYFCQQYSKLPRTFGCGTKLEIK

SEQ ID NO: 2388 - protein, 7 aa, Artificial Sequence
  Synthetic
SSSYFWG

SEQ ID NO: 2389 - protein, 16 aa, Artificial Sequence
  Synthetic
NIYYSGSSNYNPSLKS

SEQ ID NO: 2390 - protein, 11 aa, Artificial Sequence
  Synthetic
LPRGDRDAFDI

SEQ ID NO: 2391 - protein, 11 aa, Artificial Sequence
  Synthetic
RASQGISNYLA

SEQ ID NO: 2392 - protein, 7 aa, Artificial Sequence
  Synthetic
AASTLQS

SEQ ID NO: 2393 - protein, 9 aa, Artificial Sequence
  Synthetic
QQSYSTPFT

SEQ ID NO: 2394 - protein, 121 aa, Artificial Sequence
  Synthetic
QVQLQESGPGLVKPSETLSLTCTVSGGSISSSSYFWGWIRQPPGKCLEWIGNIYYSGSSNYNPSLKSRVTISVDTSKNQFSLKLSSVTAADTAVYYCARLPRGDRDAFDIWGQGTMVTVSS

SEQ ID NO: 2395 - protein, 107 aa, Artificial Sequence
  Synthetic
DIVMTQSPSSLSASVGDRVTITCRASQGISNYLAWYQQKPGKVPKLLIYAASTLQSGVPSRFSGSGSGTDFTLTISSLQPEDFATYYCQQSYSTPFTFGCGTKVEIK

SEQ ID NO: 2396 - protein, 107 aa, Artificial Sequence
  Synthetic
EIVMTQSPSSLSASVGDRVTITCRASQGISNYLAWYQQKPGKVPKLLIYAASTLQSGVPSRFSGSGSGTDFTLTISSLQPEDFATYYCQQSYSTPFTFGCGTKVEIK

SEQ ID NO: 2397 - protein, 5 aa, Artificial Sequence
  Synthetic
DYYMT

SEQ ID NO: 2398 - protein, 17 aa, Artificial Sequence
  Synthetic
YISSSGSTIYYADSVKG

SEQ ID NO: 2399 - protein, 8 aa, Artificial Sequence
  Synthetic
DRNSHFDY

SEQ ID NO: 2400 - protein, 11 aa, Artificial Sequence
  Synthetic
RASQGINTWLA

SEQ ID NO: 2401 - protein, 7 aa, Artificial Sequence
  Synthetic
GASGLQS

SEQ ID NO: 2402 - protein, 9 aa, Artificial Sequence
  Synthetic
QQAKSFPRT

SEQ ID NO: 2403 - protein, 117 aa, Artificial Sequence
  Synthetic
QVQLVESGGGLVKPGGSLRLSCAASGFTFSDYYMTWIRQAPGKGLEWLSYISSSGSTIYYADSVKGRFTISRDNAKNSLFLQMNSLRAEDTAVYYCARDRNSHFDYWGQGTLVTVSS

SEQ ID NO: 2404 - protein, 107 aa, Artificial Sequence
  Synthetic
DIQMTQSPSSVSASVGDRVTITCRASQGINTWLAWYQQKPGKAPKLLIYGASGLQSGVPSRFSGSGSGTDFTLTISSLQPEDFATYYCQQAKSFPRTFGQGTKVEIK

SEQ ID NO: 2405 - protein, 107 aa, Artificial Sequence
  Synthetic
EIQMTQSPSSVSASVGDRVTITCRASQGINTWLAWYQQKPGKAPKLLIYGASGLQSGVPSRFSGSGSGTDFTLTISSLQPEDFATYYCQQAKSFPRTFGQGTKVEIK

SEQ ID NO: 2406 - protein, 5 aa, Artificial Sequence
  Synthetic
GYYIH

SEQ ID NO: 2407 - protein, 17 aa, Artificial Sequence
  Synthetic
WINPNSGGTNYAQKFQG

SEQ ID NO: 2408 - protein, 17 aa, Artificial Sequence
  Synthetic
VEAVAGREYYYFSGMDV

SEQ ID NO: 2409 - protein, 11 aa, Artificial Sequence
  Synthetic
SGEKLGDKYVY

SEQ ID NO: 2410 - protein, 7 aa, Artificial Sequence
  Synthetic
QSTKRPS

SEQ ID NO: 2411 - protein, 9 aa, Artificial Sequence
  Synthetic
QAYHASTAV

SEQ ID NO: 2412 - protein, 126 aa, Artificial Sequence
  Synthetic
QVQLVQSGAEVKKPGASVKVSCKASGYTFTGYYIHWVRQAPGQCLEWMGWINPNSGGTNYAQKFQGRVTMTRDTSISTAYMELSRLRSDDTAVYYCARVEAVAGREYYYFSGMDVWGQGTTVTVSS

SEQ ID NO: 2413 - protein, 106 aa, Artificial Sequence
  Synthetic
SYELTQPPSVSVSPGQTASITCSGEKLGDKYVYWYQQKPGQSPVLVIYQSTKRPSGVPERFSGSNSGNTATLTISGTQAMDEADYYCQAYHASTAVFGCGTKLTVL

SEQ ID NO: 2414 - protein, 986 aa, Artificial Sequence
  Synthetic
QVQLQESGPGLVKPSETLSLTCTVSGGSISSSSYFWGWIRQPPGKCLEWIGNIYYSGSSNYNPSLKSRVTISVDTSKNQFSLKLSSVTAADTAVYYCARLPRGDRDAFDIWGQGTMVTVSSGGGGSGGGGSGGGGSDIVMTQSPSSLSASVGDRVTITCRASQGISNYLAWYQQKPGKVPKLLIYAASTLQSGVPSRFSGSGSGTDFTLTISSLQPEDFATYYCQQSYSTPFTFGCGTKVEIKSGGGGSEVQLVESGGGLVQPGGSLKLSCAASGFTFNKYAMNWVRQAPGKGLEWVARIRSKYNNYATYYADSVKDRFTISRDDSKNTAYLQMNNLKTEDTAVYYCVRHGNFGNSYISYWAYWGQGTLVTVSSGGGGSGGGGSGGGGSQTVVTQEPSLTVSPGGTVTLTCGSSTGAVTSGNYPNWVQQKPGQAPRGLIGGTKFLAPGTPARFSGSLLGGKAALTLSGVQPEDEAEYYCVLWYSNRWVFGGGTKLTVLGGGGDKTHTCPPCPAPELLGGPSVFLFPPKPKDTLMISRTPEVTCVVVDVSHEDPEVKFNWYVDGVEVHNAKTKPCEEQYGSTYRCVSVLTVLHQDWLNGKEYKCKVSNKALPAPIEKTISKAKGQPREPQVYTLPPSREEMTKNQVSLTCLVKGFYPSDIAVEWESNGQPENNYKTTPPVLDSDGSFFLYSKLTVDKSRWQQGNVFSCSVMHEALHNHYTQKSLSLSPGKGGGGSGGGGSGGGGSGGGGSGGGGSGGGGSDKTHTCPPCPAPELLGGPSVFLFPPKPKDTLMISRTPEVTCVVVDVSHEDPEVKFNWYVDGVEVHNAKTKPCEEQYGSTYRCVSVLTVLHQDWLNGKEYKCKVSNKALPAPIEKTISKAKGQPREPQVYTLPPSREEMTKNQVSLTCLVKGFYPSDIAVEWESNGQPENNYKTTPPVLDSDGSFFLYSKLTVDKSRWQQGNVFSCSVMHEALHNHYTQKSLSLSPGK

SEQ ID NO: 2415 - protein, 986 aa, Artificial Sequence
  Synthetic
QVQLQESGPGLVKPSETLSLTCTVSGGSISSSSYFWGWIRQPPGKCLEWIGNIYYSGSSNYNPSLKSRVTISVDTSKNQFSLKLSSVTAADTAVYYCARLPRGDRDAFDIWGQGTMVTVSSGGGGSGGGGSGGGGSDIVMTQSPSSLSASVGDRVTITCRASQGISNYLAWYQQKPGKVPKLLIYAASTLQSGVPSRFSGSGSGTDFTLTISSLQPEDFATYYCQQSYSTPFTFGCGTKVEIKSGGGGSEVQLVESGGGLVQPGGSLKLSCAASGFTFNKYAINWVRQAPGKGLEWVARIRSKYNNYATYYADAVKDRFTISRDDSKNTVYLQMNNLKTEDTAVYYCARAGNFGSSYISYWAYWGQGTLVTVSSGGGGSGGGGSGGGGSQTVVTQEPSLTVSPGGTVTITCGSSTGAVTSGNYPNWVQKKPGQAPRGLIGGTKFLAPGTPARFSGSLSGGKAALTLSGVQPEDEAEYYCVLWYSNRWVFGSGTKLTVLGGGGDKTHTCPPCPAPELLGGPSVFLFPPKPKDTLMISRTPEVTCVVVDVSHEDPEVKFNWYVDGVEVHNAKTKPCEEQYGSTYRCVSVLTVLHQDWLNGKEYKCKVSNKALPAPIEKTISKAKGQPREPQVYTLPPSREEMTKNQVSLTCLVKGFYPSDIAVEWESNGQPENNYKTTPPVLDSDGSFFLYSKLTVDKSRWQQGNVFSCSVMHEALHNHYTQKSLSLSPGKGGGGSGGGGSGGGGSGGGGSGGGGSGGGGSDKTHTCPPCPAPELLGGPSVFLFPPKPKDTLMISRTPEVTCVVVDVSHEDPEVKFNWYVDGVEVHNAKTKPCEEQYGSTYRCVSVLTVLHQDWLNGKEYKCKVSNKALPAPIEKTISKAKGQPREPQVYTLPPSREEMTKNQVSLTCLVKGFYPSDIAVEWESNGQPENNYKTTPPVLDSDGSFFLYSKLTVDKSRWQQGNVFSCSVMHEALHNHYTQKSLSLSPGK

SEQ ID NO: 2416 - protein, 986 aa, Artificial Sequence
  Synthetic
QVQLQESGPGLVKPSETLSLTCTVSGGSISSSSYFWGWIRQPPGKCLEWIGNIYYSGSSNYNPSLKSRVTISVDTSKNQFSLKLSSVTAADTAVYYCARLPRGDRDAFDIWGQGTMVTVSSGGGGSGGGGSGGGGSDIVMTQSPSSLSASVGDRVTITCRASQGISNYLAWYQQKPGKVPKLLIYAASTLQSGVPSRFSGSGSGTDFTLTISSLQPEDFATYYCQQSYSTPFTFGCGTKVEIKSGGGGSEVQLVESGGGLVQPGGSLKLSCAASGFTFNKYAMNWVRQAPGKGLEWVARIRSKYNNYATYYAEAVKGRFTISRDDSKNTVYLQMNNLKTEDTAVYYCVRNENIGTSYISYWAYWGQGTLVTVSSGGGGSGGGGSGGGGSQTVVTQEPSLTVSPGGTVTITCGSSTGAVTSGNYPNWVQQKPGQAPRGLIGGTKFLAPGTPARFSGSLSGGKAALTLSGVQPEDEAEYYCVLWYSNRWVFGSGTKLTVLGGGGDKTHTCPPCPAPELLGGPSVFLFPPKPKDTLMISRTPEVTCVVVDVSHEDPEVKFNWYVDGVEVHNAKTKPCEEQYGSTYRCVSVLTVLHQDWLNGKEYKCKVSNKALPAPIEKTISKAKGQPREPQVYTLPPSREEMTKNQVSLTCLVKGFYPSDIAVEWESNGQPENNYKTTPPVLDSDGSFFLYSKLTVDKSRWQQGNVFSCSVMHEALHNHYTQKSLSLSPGKGGGGSGGGGSGGGGSGGGGSGGGGSGGGGSDKTHTCPPCPAPELLGGPSVFLFPPKPKDTLMISRTPEVTCVVVDVSHEDPEVKFNWYVDGVEVHNAKTKPCEEQYGSTYRCVSVLTVLHQDWLNGKEYKCKVSNKALPAPIEKTISKAKGQPREPQVYTLPPSREEMTKNQVSLTCLVKGFYPSDIAVEWESNGQPENNYKTTPPVLDSDGSFFLYSKLTVDKSRWQQGNVFSCSVMHEALHNHYTQKSLSLSPGK

SEQ ID NO: 2417 - protein, 986 aa, Artificial Sequence
  Synthetic
QVQLQESGPGLVKPSETLSLTCTVSGGSISSSSYFWGWIRQPPGKCLEWIGNIYYSGSSNYNPSLKSRVTISVDTSKNQFSLKLSSVTAADTAVYYCARLPRGDRDAFDIWGQGTMVTVSSGGGGSGGGGSGGGGSDIVMTQSPSSLSASVGDRVTITCRASQGISNYLAWYQQKPGKVPKLLIYAASTLQSGVPSRFSGSGSGTDFTLTISSLQPEDFATYYCQQSYSTPFTFGCGTKVEIKSGGGGSEVQLVESGGGLVQPGGSLKLSCAASGFTFNKYAMNWVRQAPGKGMEWVARIRSKYNNYATYYADAVKDRFTISRDDSKNTLYLQMNNLKTEDTAVYYCVRAGNFGSSYISYFAYWGQGTLVTVSSGGGGSGGGGSGGGGSQTVVTQEPSLTVSPGGTVTITCGSSTGAVTSGNYPNWIQKKPGQAPRGLIGGTKFLAPGTPARFSGSLEGGKAALTLSGVQPEDEAEYYCVLYYSNRWVFGSGTKLTVLGGGGDKTHTCPPCPAPELLGGPSVFLFPPKPKDTLMISRTPEVTCVVVDVSHEDPEVKFNWYVDGVEVHNAKTKPCEEQYGSTYRCVSVLTVLHQDWLNGKEYKCKVSNKALPAPIEKTISKAKGQPREPQVYTLPPSREEMTKNQVSLTCLVKGFYPSDIAVEWESNGQPENNYKTTPPVLDSDGSFFLYSKLTVDKSRWQQGNVFSCSVMHEALHNHYTQKSLSLSPGKGGGGSGGGGSGGGGSGGGGSGGGGSGGGGSDKTHTCPPCPAPELLGGPSVFLFPPKPKDTLMISRTPEVTCVVVDVSHEDPEVKFNWYVDGVEVHNAKTKPCEEQYGSTYRCVSVLTVLHQDWLNGKEYKCKVSNKALPAPIEKTISKAKGQPREPQVYTLPPSREEMTKNQVSLTCLVKGFYPSDIAVEWESNGQPENNYKTTPPVLDSDGSFFLYSKLTVDKSRWQQGNVFSCSVMHEALHNHYTQKSLSLSPGK

SEQ ID NO: 2418 - protein, 986 aa, Artificial Sequence
  Synthetic
QVQLQESGPGLVKPSETLSLTCTVSGGSISSSSYFWGWIRQPPGKCLEWIGNIYYSGSSNYNPSLKSRVTISVDTSKNQFSLKLSSVTAADTAVYYCARLPRGDRDAFDIWGQGTMVTVSSGGGGSGGGGSGGGGSDIVMTQSPSSLSASVGDRVTITCRASQGISNYLAWYQQKPGKVPKLLIYAASTLQSGVPSRFSGSGSGTDFTLTISSLQPEDFATYYCQQSYSTPFTFGCGTKVEIKSGGGGSEVQLVESGGGLVQPGGSLKLSCAASGFTFNKYAMNWVRQAPGKGMEWVARIRSKYNNYATYYADAVKDRFTISRDDSKNTLYLQMNNLKTEDTAVYYCVRAGNFGTSYISYWAYWGQGTLVTVSSGGGGSGGGGSGGGGSQTVVTQEPSLTVSPGGTVTITCGSSTGAVTSGNYPNWVQKKPGQAPRGLIGGTKFLAPGTPARFSGSLSGGKAALTLSGVQPEDEAEYYCVLWYSNRWVFGSGTKLTVLGGGGDKTHTCPPCPAPELLGGPSVFLFPPKPKDTLMISRTPEVTCVVVDVSHEDPEVKFNWYVDGVEVHNAKTKPCEEQYGSTYRCVSVLTVLHQDWLNGKEYKCKVSNKALPAPIEKTISKAKGQPREPQVYTLPPSREEMTKNQVSLTCLVKGFYPSDIAVEWESNGQPENNYKTTPPVLDSDGSFFLYSKLTVDKSRWQQGNVFSCSVMHEALHNHYTQKSLSLSPGKGGGGSGGGGSGGGGSGGGGSGGGGSGGGGSDKTHTCPPCPAPELLGGPSVFLFPPKPKDTLMISRTPEVTCVVVDVSHEDPEVKFNWYVDGVEVHNAKTKPCEEQYGSTYRCVSVLTVLHQDWLNGKEYKCKVSNKALPAPIEKTISKAKGQPREPQVYTLPPSREEMTKNQVSLTCLVKGFYPSDIAVEWESNGQPENNYKTTPPVLDSDGSFFLYSKLTVDKSRWQQGNVFSCSVMHEALHNHYTQKSLSLSPGK

SEQ ID NO: 2419 - protein, 986 aa, Artificial Sequence
  Synthetic
QVQLQESGPGLVKPSETLSLTCTVSGGSISSSSYFWGWIRQPPGKCLEWIGNIYYSGSSNYNPSLKSRVTISVDTSKNQFSLKLSSVTAADTAVYYCARLPRGDRDAFDIWGQGTMVTVSSGGGGSGGGGSGGGGSDIVMTQSPSSLSASVGDRVTITCRASQGISNYLAWYQQKPGKVPKLLIYAASTLQSGVPSRFSGSGSGTDFTLTISSLQPEDFATYYCQQSYSTPFTFGCGTKVEIKSGGGGSEVQLVESGGGLVQPGGSLKLSCAASGFTFNKYAINWVREAPGKGLEWVARIRSKYNNYATYYADAVKDRFTISRDDSKNTAYLQMNNLKTEDTAVYYCVRNANFGTSYISYFAYWGQGTLVTVSSGGGGSGGGGSGGGGSQTVVTQEPSLTVSPGGTVTLTCGSSTGAVTSGNYPNWVQKKPGQAPRGLIGGTKFLAPGTPARFSGSLLGGKAALTLSGVQPEDEAEYYCVLWYSNRWVFGSGTKLTVLGGGGDKTHTCPPCPAPELLGGPSVFLFPPKPKDTLMISRTPEVTCVVVDVSHEDPEVKFNWYVDGVEVHNAKTKPCEEQYGSTYRCVSVLTVLHQDWLNGKEYKCKVSNKALPAPIEKTISKAKGQPREPQVYTLPPSREEMTKNQVSLTCLVKGFYPSDIAVEWESNGQPENNYKTTPPVLDSDGSFFLYSKLTVDKSRWQQGNVFSCSVMHEALHNHYTQKSLSLSPGKGGGGSGGGGSGGGGSGGGGSGGGGSGGGGSDKTHTCPPCPAPELLGGPSVFLFPPKPKDTLMISRTPEVTCVVVDVSHEDPEVKFNWYVDGVEVHNAKTKPCEEQYGSTYRCVSVLTVLHQDWLNGKEYKCKVSNKALPAPIEKTISKAKGQPREPQVYTLPPSREEMTKNQVSLTCLVKGFYPSDIAVEWESNGQPENNYKTTPPVLDSDGSFFLYSKLTVDKSRWQQGNVFSCSVMHEALHNHYTQKSLSLSPGK

SEQ ID NO: 2420 - protein, 982 aa, Artificial Sequence
  Synthetic
QVQLVESGGGLVKPGGSLRLSCAASGFTFSDYYMTWIRQAPGKGLEWLSYISSSGSTIYYADSVKGRFTISRDNAKNSLFLQMNSLRAEDTAVYYCARDRNSHFDYWGQGTLVTVSSGGGGSGGGGSGGGGSDIQMTQSPSSVSASVGDRVTITCRASQGINTWLAWYQQKPGKAPKLLIYGASGLQSGVPSRFSGSGSGTDFTLTISSLQPEDFATYYCQQAKSFPRTFGQGTKVEIKSGGGGSEVQLVESGGGLVQPGGSLKLSCAASGFTFNKYAMNWVRQAPGKGLEWVARIRSKYNNYATYYADSVKDRFTISRDDSKNTAYLQMNNLKTEDTAVYYCVRHGNFGNSYISYWAYWGQGTLVTVSSGGGGSGGGGSGGGGSQTVVTQEPSLTVSPGGTVTLTCGSSTGAVTSGNYPNWVQQKPGQAPRGLIGGTKFLAPGTPARFSGSLLGGKAALTLSGVQPEDEAEYYCVLWYSNRWVFGGGTKLTVLGGGGDKTHTCPPCPAPELLGGPSVFLFPPKPKDTLMISRTPEVTCVVVDVSHEDPEVKFNWYVDGVEVHNAKTKPCEEQYGSTYRCVSVLTVLHQDWLNGKEYKCKVSNKALPAPIEKTISKAKGQPREPQVYTLPPSREEMTKNQVSLTCLVKGFYPSDIAVEWESNGQPENNYKTTPPVLDSDGSFFLYSKLTVDKSRWQQGNVFSCSVMHEALHNHYTQKSLSLSPGKGGGGSGGGGSGGGGSGGGGSGGGGSGGGGSDKTHTCPPCPAPELLGGPSVFLFPPKPKDTLMISRTPEVTCVVVDVSHEDPEVKFNWYVDGVEVHNAKTKPCEEQYGSTYRCVSVLTVLHQDWLNGKEYKCKVSNKALPAPIEKTISKAKGQPREPQVYTLPPSREEMTKNQVSLTCLVKGFYPSDIAVEWESNGQPENNYKTTPPVLDSDGSFFLYSKLTVDKSRWQQGNVFSCSVMHEALHNHYTQKSLSLSPGK

SEQ ID NO: 2421 - protein, 982 aa, Artificial Sequence
  Synthetic
QVQLVESGGGLVKPGGSLRLSCAASGFTFSDYYMTWIRQAPGKGLEWLSYISSSGSTIYYADSVKGRFTISRDNAKNSLFLQMNSLRAEDTAVYYCARDRNSHFDYWGQGTLVTVSSGGGGSGGGGSGGGGSDIQMTQSPSSVSASVGDRVTITCRASQGINTWLAWYQQKPGKAPKLLIYGASGLQSGVPSRFSGSGSGTDFTLTISSLQPEDFATYYCQQAKSFPRTFGQGTKVEIKSGGGGSEVQLVESGGGLVQPGGSLKLSCAASGFTFNKYAINWVRQAPGKGLEWVARIRSKYNNYATYYADAVKDRFTISRDDSKNTVYLQMNNLKTEDTAVYYCARAGNFGSSYISYWAYWGQGTLVTVSSGGGGSGGGGSGGGGSQTVVTQEPSLTVSPGGTVTITCGSSTGAVTSGNYPNWVQKKPGQAPRGLIGGTKFLAPGTPARFSGSLSGGKAALTLSGVQPEDEAEYYCVLWYSNRWVFGSGTKLTVLGGGGDKTHTCPPCPAPELLGGPSVFLFPPKPKDTLMISRTPEVTCVVVDVSHEDPEVKFNWYVDGVEVHNAKTKPCEEQYGSTYRCVSVLTVLHQDWLNGKEYKCKVSNKALPAPIEKTISKAKGQPREPQVYTLPPSREEMTKNQVSLTCLVKGFYPSDIAVEWESNGQPENNYKTTPPVLDSDGSFFLYSKLTVDKSRWQQGNVFSCSVMHEALHNHYTQKSLSLSPGKGGGGSGGGGSGGGGSGGGGSGGGGSGGGGSDKTHTCPPCPAPELLGGPSVFLFPPKPKDTLMISRTPEVTCVVVDVSHEDPEVKFNWYVDGVEVHNAKTKPCEEQYGSTYRCVSVLTVLHQDWLNGKEYKCKVSNKALPAPIEKTISKAKGQPREPQVYTLPPSREEMTKNQVSLTCLVKGFYPSDIAVEWESNGQPENNYKTTPPVLDSDGSFFLYSKLTVDKSRWQQGNVFSCSVMHEALHNHYTQKSLSLSPGK

SEQ ID NO: 2422 - protein, 982 aa, Artificial Sequence
  Synthetic
QVQLVESGGGLVKPGGSLRLSCAASGFTFSDYYMTWIRQAPGKGLEWLSYISSSGSTIYYADSVKGRFTISRDNAKNSLFLQMNSLRAEDTAVYYCARDRNSHFDYWGQGTLVTVSSGGGGSGGGGSGGGGSDIQMTQSPSSVSASVGDRVTITCRASQGINTWLAWYQQKPGKAPKLLIYGASGLQSGVPSRFSGSGSGTDFTLTISSLQPEDFATYYCQQAKSFPRTFGQGTKVEIKSGGGGSEVQLVESGGGLVQPGGSLKLSCAASGFTFNKYAMNWVRQAPGKGLEWVARIRSKYNNYATYYAEAVKGRFTISRDDSKNTVYLQMNNLKTEDTAVYYCVRNENIGTSYISYWAYWGQGTLVTVSSGGGGSGGGGSGGGGSQTVVTQEPSLTVSPGGTVTITCGSSTGAVTSGNYPNWVQQKPGQAPRGLIGGTKFLAPGTPARFSGSLSGGKAALTLSGVQPEDEAEYYCVLWYSNRWVFGSGTKLTVLGGGGDKTHTCPPCPAPELLGGPSVFLFPPKPKDTLMISRTPEVTCVVVDVSHEDPEVKFNWYVDGVEVHNAKTKPCEEQYGSTYRCVSVLTVLHQDWLNGKEYKCKVSNKALPAPIEKTISKAKGQPREPQVYTLPPSREEMTKNQVSLTCLVKGFYPSDIAVEWESNGQPENNYKTTPPVLDSDGSFFLYSKLTVDKSRWQQGNVFSCSVMHEALHNHYTQKSLSLSPGKGGGGSGGGGSGGGGSGGGGSGGGGSGGGGSDKTHTCPPCPAPELLGGPSVFLFPPKPKDTLMISRTPEVTCVVVDVSHEDPEVKFNWYVDGVEVHNAKTKPCEEQYGSTYRCVSVLTVLHQDWLNGKEYKCKVSNKALPAPIEKTISKAKGQPREPQVYTLPPSREEMTKNQVSLTCLVKGFYPSDIAVEWESNGQPENNYKTTPPVLDSDGSFFLYSKLTVDKSRWQQGNVFSCSVMHEALHNHYTQKSLSLSPGK

SEQ ID NO: 2423 - protein, 982 aa, Artificial Sequence
  Synthetic
QVQLVESGGGLVKPGGSLRLSCAASGFTFSDYYMTWIRQAPGKGLEWLSYISSSGSTIYYADSVKGRFTISRDNAKNSLFLQMNSLRAEDTAVYYCARDRNSHFDYWGQGTLVTVSSGGGGSGGGGSGGGGSDIQMTQSPSSVSASVGDRVTITCRASQGINTWLAWYQQKPGKAPKLLIYGASGLQSGVPSRFSGSGSGTDFTLTISSLQPEDFATYYCQQAKSFPRTFGQGTKVEIKSGGGGSEVQLVESGGGLVQPGGSLKLSCAASGFTFNKYAMNWVRQAPGKGMEWVARIRSKYNNYATYYADAVKDRFTISRDDSKNTLYLQMNNLKTEDTAVYYCVRAGNFGSSYISYFAYWGQGTLVTVSSGGGGSGGGGSGGGGSQTVVTQEPSLTVSPGGTVTITCGSSTGAVTSGNYPNWIQKKPGQAPRGLIGGTKFLAPGTPARFSGSLEGGKAALTLSGVQPEDEAEYYCVLYYSNRWVFGSGTKLTVLGGGGDKTHTCPPCPAPELLGGPSVFLFPPKPKDTLMISRTPEVTCVVVDVSHEDPEVKFNWYVDGVEVHNAKTKPCEEQYGSTYRCVSVLTVLHQDWLNGKEYKCKVSNKALPAPIEKTISKAKGQPREPQVYTLPPSREEMTKNQVSLTCLVKGFYPSDIAVEWESNGQPENNYKTTPPVLDSDGSFFLYSKLTVDKSRWQQGNVFSCSVMHEALHNHYTQKSLSLSPGKGGGGSGGGGSGGGGSGGGGSGGGGSGGGGSDKTHTCPPCPAPELLGGPSVFLFPPKPKDTLMISRTPEVTCVVVDVSHEDPEVKFNWYVDGVEVHNAKTKPCEEQYGSTYRCVSVLTVLHQDWLNGKEYKCKVSNKALPAPIEKTISKAKGQPREPQVYTLPPSREEMTKNQVSLTCLVKGFYPSDIAVEWESNGQPENNYKTTPPVLDSDGSFFLYSKLTVDKSRWQQGNVFSCSVMHEALHNHYTQKSLSLSPGK

SEQ ID NO: 2424 - protein, 982 aa, Artificial Sequence
  Synthetic
QVQLVESGGGLVKPGGSLRLSCAASGFTFSDYYMTWIRQAPGKGLEWLSYISSSGSTIYYADSVKGRFTISRDNAKNSLFLQMNSLRAEDTAVYYCARDRNSHFDYWGQGTLVTVSSGGGGSGGGGSGGGGSDIQMTQSPSSVSASVGDRVTITCRASQGINTWLAWYQQKPGKAPKLLIYGASGLQSGVPSRFSGSGSGTDFTLTISSLQPEDFATYYCQQAKSFPRTFGQGTKVEIKSGGGGSEVQLVESGGGLVQPGGSLKLSCAASGFTFNKYAINWVREAPGKGLEWVARIRSKYNNYATYYADAVKDRFTISRDDSKNTAYLQMNNLKTEDTAVYYCVRNANFGTSYISYFAYWGQGTLVTVSSGGGGSGGGGSGGGGSQTVVTQEPSLTVSPGGTVTLTCGSSTGAVTSGNYPNWVQKKPGQAPRGLIGGTKFLAPGTPARFSGSLLGGKAALTLSGVQPEDEAEYYCVLWYSNRWVFGSGTKLTVLGGGGDKTHTCPPCPAPELLGGPSVFLFPPKPKDTLMISRTPEVTCVVVDVSHEDPEVKFNWYVDGVEVHNAKTKPCEEQYGSTYRCVSVLTVLHQDWLNGKEYKCKVSNKALPAPIEKTISKAKGQPREPQVYTLPPSREEMTKNQVSLTCLVKGFYPSDIAVEWESNGQPENNYKTTPPVLDSDGSFFLYSKLTVDKSRWQQGNVFSCSVMHEALHNHYTQKSLSLSPGKGGGGSGGGGSGGGGSGGGGSGGGGSGGGGSDKTHTCPPCPAPELLGGPSVFLFPPKPKDTLMISRTPEVTCVVVDVSHEDPEVKFNWYVDGVEVHNAKTKPCEEQYGSTYRCVSVLTVLHQDWLNGKEYKCKVSNKALPAPIEKTISKAKGQPREPQVYTLPPSREEMTKNQVSLTCLVKGFYPSDIAVEWESNGQPENNYKTTPPVLDSDGSFFLYSKLTVDKSRWQQGNVFSCSVMHEALHNHYTQKSLSLSPGK

SEQ ID NO: 2425 - protein, 982 aa, Artificial Sequence
  Synthetic
QVQLVESGGGLVKPGGSLRLSCAASGFTFSDYYMTWIRQAPGKGLEWLSYISSSGSTIYYADSVKGRFTISRDNAKNSLFLQMNSLRAEDTAVYYCARDRNSHFDYWGQGTLVTVSSGGGGSGGGGSGGGGSDIQMTQSPSSVSASVGDRVTITCRASQGINTWLAWYQQKPGKAPKLLIYGASGLQSGVPSRFSGSGSGTDFTLTISSLQPEDFATYYCQQAKSFPRTFGQGTKVEIKSGGGGSEVQLVESGGGLVQPGGSLKLSCAASGFTFNKYAMNWVRQAPGKGMEWVARIRSKYNNYATYYADAVKDRFTISRDDSKNTLYLQMNNLKTEDTAVYYCVRAGNFGTSYISYWAYWGQGTLVTVSSGGGGSGGGGSGGGGSQTVVTQEPSLTVSPGGTVTITCGSSTGAVTSGNYPNWVQKKPGQAPRGLIGGTKFLAPGTPARFSGSLSGGKAALTLSGVQPEDEAEYYCVLWYSNRWVFGSGTKLTVLGGGGDKTHTCPPCPAPELLGGPSVFLFPPKPKDTLMISRTPEVTCVVVDVSHEDPEVKFNWYVDGVEVHNAKTKPCEEQYGSTYRCVSVLTVLHQDWLNGKEYKCKVSNKALPAPIEKTISKAKGQPREPQVYTLPPSREEMTKNQVSLTCLVKGFYPSDIAVEWESNGQPENNYKTTPPVLDSDGSFFLYSKLTVDKSRWQQGNVFSCSVMHEALHNHYTQKSLSLSPGKGGGGSGGGGSGGGGSGGGGSGGGGSGGGGSDKTHTCPPCPAPELLGGPSVFLFPPKPKDTLMISRTPEVTCVVVDVSHEDPEVKFNWYVDGVEVHNAKTKPCEEQYGSTYRCVSVLTVLHQDWLNGKEYKCKVSNKALPAPIEKTISKAKGQPREPQVYTLPPSREEMTKNQVSLTCLVKGFYPSDIAVEWESNGQPENNYKTTPPVLDSDGSFFLYSKLTVDKSRWQQGNVFSCSVMHEALHNHYTQKSLSLSPGK

SEQ ID NO: 2426 - protein, 990 aa, Artificial Sequence
  Synthetic
QVQLVQSGAEVKKPGASVKVSCKASGYTFTGYYIHWVRQAPGQCLEWMGWINPNSGGTNYAQKFQGRVTMTRDTSISTAYMELSRLRSDDTAVYYCARVEAVAGREYYYFSGMDVWGQGTTVTVSSGGGGSGGGGSGGGGSSYELTQPPSVSVSPGQTASITCSGEKLGDKYVYWYQQKPGQSPVLVIYQSTKRPSGVPERFSGSNSGNTATLTISGTQAMDEADYYCQAYHASTAVFGCGTKLTVLSGGGGSEVQLVESGGGLVQPGGSLKLSCAASGFTFNKYAMNWVRQAPGKGLEWVARIRSKYNNYATYYADSVKDRFTISRDDSKNTAYLQMNNLKTEDTAVYYCVRHGNFGNSYISYWAYWGQGTLVTVSSGGGGSGGGGSGGGGSQTVVTQEPSLTVSPGGTVTLTCGSSTGAVTSGNYPNWVQQKPGQAPRGLIGGTKFLAPGTPARFSGSLLGGKAALTLSGVQPEDEAEYYCVLWYSNRWVFGGGTKLTVLGGGGDKTHTCPPCPAPELLGGPSVFLFPPKPKDTLMISRTPEVTCVVVDVSHEDPEVKFNWYVDGVEVHNAKTKPCEEQYGSTYRCVSVLTVLHQDWLNGKEYKCKVSNKALPAPIEKTISKAKGQPREPQVYTLPPSREEMTKNQVSLTCLVKGFYPSDIAVEWESNGQPENNYKTTPPVLDSDGSFFLYSKLTVDKSRWQQGNVFSCSVMHEALHNHYTQKSLSLSPGKGGGGSGGGGSGGGGSGGGGSGGGGSGGGGSDKTHTCPPCPAPELLGGPSVFLFPPKPKDTLMISRTPEVTCVVVDVSHEDPEVKFNWYVDGVEVHNAKTKPCEEQYGSTYRCVSVLTVLHQDWLNGKEYKCKVSNKALPAPIEKTISKAKGQPREPQVYTLPPSREEMTKNQVSLTCLVKGFYPSDIAVEWESNGQPENNYKTTPPVLDSDGSFFLYSKLTVDKSRWQQGNVFSCSVMHEALHNHYTQKSLSLSPGK

SEQ ID NO: 2427 - protein, 990 aa, Artificial Sequence
  Synthetic
QVQLVQSGAEVKKPGASVKVSCKASGYTFTGYYIHWVRQAPGQCLEWMGWINPNSGGTNYAQKFQGRVTMTRDTSISTAYMELSRLRSDDTAVYYCARVEAVAGREYYYFSGMDVWGQGTTVTVSSGGGGSGGGGSGGGGSSYELTQPPSVSVSPGQTASITCSGEKLGDKYVYWYQQKPGQSPVLVIYQSTKRPSGVPERFSGSNSGNTATLTISGTQAMDEADYYCQAYHASTAVFGCGTKLTVLSGGGGSEVQLVESGGGLVQPGGSLKLSCAASGFTFNKYAINWVRQAPGKGLEWVARIRSKYNNYATYYADAVKDRFTISRDDSKNTVYLQMNNLKTEDTAVYYCARAGNFGSSYISYWAYWGQGTLVTVSSGGGGSGGGGSGGGGSQTVVTQEPSLTVSPGGTVTITCGSSTGAVTSGNYPNWVQKKPGQAPRGLIGGTKFLAPGTPARFSGSLSGGKAALTLSGVQPEDEAEYYCVLWYSNRWVFGSGTKLTVLGGGGDKTHTCPPCPAPELLGGPSVFLFPPKPKDTLMISRTPEVTCVVVDVSHEDPEVKFNWYVDGVEVHNAKTKPCEEQYGSTYRCVSVLTVLHQDWLNGKEYKCKVSNKALPAPIEKTISKAKGQPREPQVYTLPPSREEMTKNQVSLTCLVKGFYPSDIAVEWESNGQPENNYKTTPPVLDSDGSFFLYSKLTVDKSRWQQGNVFSCSVMHEALHNHYTQKSLSLSPGKGGGGSGGGGSGGGGSGGGGSGGGGSGGGGSDKTHTCPPCPAPELLGGPSVFLFPPKPKDTLMISRTPEVTCVVVDVSHEDPEVKFNWYVDGVEVHNAKTKPCEEQYGSTYRCVSVLTVLHQDWLNGKEYKCKVSNKALPAPIEKTISKAKGQPREPQVYTLPPSREEMTKNQVSLTCLVKGFYPSDIAVEWESNGQPENNYKTTPPVLDSDGSFFLYSKLTVDKSRWQQGNVFSCSVMHEALHNHYTQKSLSLSPGK

SEQ ID NO: 2428 - protein, 990 aa, Artificial Sequence
  Synthetic
QVQLVQSGAEVKKPGASVKVSCKASGYTFTGYYIHWVRQAPGQCLEWMGWINPNSGGTNYAQKFQGRVTMTRDTSISTAYMELSRLRSDDTAVYYCARVEAVAGREYYYFSGMDVWGQGTTVTVSSGGGGSGGGGSGGGGSSYELTQPPSVSVSPGQTASITCSGEKLGDKYVYWYQQKPGQSPVLVIYQSTKRPSGVPERFSGSNSGNTATLTISGTQAMDEADYYCQAYHASTAVFGCGTKLTVLSGGGGSEVQLVESGGGLVQPGGSLKLSCAASGFTFNKYAMNWVRQAPGKGLEWVARIRSKYNNYATYYAEAVKGRFTISRDDSKNTVYLQMNNLKTEDTAVYYCVRNENIGTSYISYWAYWGQGTLVTVSSGGGGSGGGGSGGGGSQTVVTQEPSLTVSPGGTVTITCGSSTGAVTSGNYPNWVQQKPGQAPRGLIGGTKFLAPGTPARFSGSLSGGKAALTLSGVQPEDEAEYYCVLWYSNRWVFGSGTKLTVLGGGGDKTHTCPPCPAPELLGGPSVFLFPPKPKDTLMISRTPEVTCVVVDVSHEDPEVKFNWYVDGVEVHNAKTKPCEEQYGSTYRCVSVLTVLHQDWLNGKEYKCKVSNKALPAPIEKTISKAKGQPREPQVYTLPPSREEMTKNQVSLTCLVKGFYPSDIAVEWESNGQPENNYKTTPPVLDSDGSFFLYSKLTVDKSRWQQGNVFSCSVMHEALHNHYTQKSLSLSPGKGGGGSGGGGSGGGGSGGGGSGGGGSGGGGSDKTHTCPPCPAPELLGGPSVFLFPPKPKDTLMISRTPEVTCVVVDVSHEDPEVKFNWYVDGVEVHNAKTKPCEEQYGSTYRCVSVLTVLHQDWLNGKEYKCKVSNKALPAPIEKTISKAKGQPREPQVYTLPPSREEMTKNQVSLTCLVKGFYPSDIAVEWESNGQPENNYKTTPPVLDSDGSFFLYSKLTVDKSRWQQGNVFSCSVMHEALHNHYTQKSLSLSPGK

SEQ ID NO: 2429 - protein, 990 aa, Artificial Sequence
  Synthetic
QVQLVQSGAEVKKPGASVKVSCKASGYTFTGYYIHWVRQAPGQCLEWMGWINPNSGGTNYAQKFQGRVTMTRDTSISTAYMELSRLRSDDTAVYYCARVEAVAGREYYYFSGMDVWGQGTTVTVSSGGGGSGGGGSGGGGSSYELTQPPSVSVSPGQTASITCSGEKLGDKYVYWYQQKPGQSPVLVIYQSTKRPSGVPERFSGSNSGNTATLTISGTQAMDEADYYCQAYHASTAVFGCGTKLTVLSGGGGSEVQLVESGGGLVQPGGSLKLSCAASGFTFNKYAMNWVRQAPGKGMEWVARIRSKYNNYATYYADAVKDRFTISRDDSKNTLYLQMNNLKTEDTAVYYCVRAGNFGSSYISYFAYWGQGTLVTVSSGGGGSGGGGSGGGGSQTVVTQEPSLTVSPGGTVTITCGSSTGAVTSGNYPNWIQKKPGQAPRGLIGGTKFLAPGTPARFSGSLEGGKAALTLSGVQPEDEAEYYCVLYYSNRWVFGSGTKLTVLGGGGDKTHTCPPCPAPELLGGPSVFLFPPKPKDTLMISRTPEVTCVVVDVSHEDPEVKFNWYVDGVEVHNAKTKPCEEQYGSTYRCVSVLTVLHQDWLNGKEYKCKVSNKALPAPIEKTISKAKGQPREPQVYTLPPSREEMTKNQVSLTCLVKGFYPSDIAVEWESNGQPENNYKTTPPVLDSDGSFFLYSKLTVDKSRWQQGNVFSCSVMHEALHNHYTQKSLSLSPGKGGGGSGGGGSGGGGSGGGGSGGGGSGGGGSDKTHTCPPCPAPELLGGPSVFLFPPKPKDTLMISRTPEVTCVVVDVSHEDPEVKFNWYVDGVEVHNAKTKPCEEQYGSTYRCVSVLTVLHQDWLNGKEYKCKVSNKALPAPIEKTISKAKGQPREPQVYTLPPSREEMTKNQVSLTCLVKGFYPSDIAVEWESNGQPENNYKTTPPVLDSDGSFFLYSKLTVDKSRWQQGNVFSCSVMHEALHNHYTQKSLSLSPGK

SEQ ID NO: 2430 - protein, 990 aa, Artificial Sequence
  Synthetic
QVQLVQSGAEVKKPGASVKVSCKASGYTFTGYYIHWVRQAPGQCLEWMGWINPNSGGTNYAQKFQGRVTMTRDTSISTAYMELSRLRSDDTAVYYCARVEAVAGREYYYFSGMDVWGQGTTVTVSSGGGGSGGGGSGGGGSSYELTQPPSVSVSPGQTASITCSGEKLGDKYVYWYQQKPGQSPVLVIYQSTKRPSGVPERFSGSNSGNTATLTISGTQAMDEADYYCQAYHASTAVFGCGTKLTVLSGGGGSEVQLVESGGGLVQPGGSLKLSCAASGFTFNKYAMNWVRQAPGKGMEWVARIRSKYNNYATYYADAVKDRFTISRDDSKNTLYLQMNNLKTEDTAVYYCVRAGNFGTSYISYWAYWGQGTLVTVSSGGGGSGGGGSGGGGSQTVVTQEPSLTVSPGGTVTITCGSSTGAVTSGNYPNWVQKKPGQAPRGLIGGTKFLAPGTPARFSGSLSGGKAALTLSGVQPEDEAEYYCVLWYSNRWVFGSGTKLTVLGGGGDKTHTCPPCPAPELLGGPSVFLFPPKPKDTLMISRTPEVTCVVVDVSHEDPEVKFNWYVDGVEVHNAKTKPCEEQYGSTYRCVSVLTVLHQDWLNGKEYKCKVSNKALPAPIEKTISKAKGQPREPQVYTLPPSREEMTKNQVSLTCLVKGFYPSDIAVEWESNGQPENNYKTTPPVLDSDGSFFLYSKLTVDKSRWQQGNVFSCSVMHEALHNHYTQKSLSLSPGKGGGGSGGGGSGGGGSGGGGSGGGGSGGGGSDKTHTCPPCPAPELLGGPSVFLFPPKPKDTLMISRTPEVTCVVVDVSHEDPEVKFNWYVDGVEVHNAKTKPCEEQYGSTYRCVSVLTVLHQDWLNGKEYKCKVSNKALPAPIEKTISKAKGQPREPQVYTLPPSREEMTKNQVSLTCLVKGFYPSDIAVEWESNGQPENNYKTTPPVLDSDGSFFLYSKLTVDKSRWQQGNVFSCSVMHEALHNHYTQKSLSLSPGK

SEQ ID NO: 2431 - protein, 990 aa, Artificial Sequence
  Synthetic
QVQLVQSGAEVKKPGASVKVSCKASGYTFTGYYIHWVRQAPGQCLEWMGWINPNSGGTNYAQKFQGRVTMTRDTSISTAYMELSRLRSDDTAVYYCARVEAVAGREYYYFSGMDVWGQGTTVTVSSGGGGSGGGGSGGGGSSYELTQPPSVSVSPGQTASITCSGEKLGDKYVYWYQQKPGQSPVLVIYQSTKRPSGVPERFSGSNSGNTATLTISGTQAMDEADYYCQAYHASTAVFGCGTKLTVLSGGGGSEVQLVESGGGLVQPGGSLKLSCAASGFTFNKYAINWVREAPGKGLEWVARIRSKYNNYATYYADAVKDRFTISRDDSKNTAYLQMNNLKTEDTAVYYCVRNANFGTSYISYFAYWGQGTLVTVSSGGGGSGGGGSGGGGSQTVVTQEPSLTVSPGGTVTLTCGSSTGAVTSGNYPNWVQKKPGQAPRGLIGGTKFLAPGTPARFSGSLLGGKAALTLSGVQPEDEAEYYCVLWYSNRWVFGSGTKLTVLGGGGDKTHTCPPCPAPELLGGPSVFLFPPKPKDTLMISRTPEVTCVVVDVSHEDPEVKFNWYVDGVEVHNAKTKPCEEQYGSTYRCVSVLTVLHQDWLNGKEYKCKVSNKALPAPIEKTISKAKGQPREPQVYTLPPSREEMTKNQVSLTCLVKGFYPSDIAVEWESNGQPENNYKTTPPVLDSDGSFFLYSKLTVDKSRWQQGNVFSCSVMHEALHNHYTQKSLSLSPGKGGGGSGGGGSGGGGSGGGGSGGGGSGGGGSDKTHTCPPCPAPELLGGPSVFLFPPKPKDTLMISRTPEVTCVVVDVSHEDPEVKFNWYVDGVEVHNAKTKPCEEQYGSTYRCVSVLTVLHQDWLNGKEYKCKVSNKALPAPIEKTISKAKGQPREPQVYTLPPSREEMTKNQVSLTCLVKGFYPSDIAVEWESNGQPENNYKTTPPVLDSDGSFFLYSKLTVDKSRWQQGNVFSCSVMHEALHNHYTQKSLSLSPGK

SEQ ID NO: 2432 - protein, 5 aa, Artificial Sequence
  Synthetic
GYYWS

SEQ ID NO: 2433 - protein, 16 aa, Artificial Sequence
  Synthetic
DIDASGSTKYNPSLKS

SEQ ID NO: 2434 - protein, 12 aa, Artificial Sequence
  Synthetic
KKYSTVWSYFDN

SEQ ID NO: 2435 - protein, 11 aa, Artificial Sequence
  Synthetic
SGDKLGDKYAS

SEQ ID NO: 2436 - protein, 7 aa, Artificial Sequence
  Synthetic
QDRKRPS

SEQ ID NO: 2437 - protein, 9 aa, Artificial Sequence
  Synthetic
QAWGSSTAV

SEQ ID NO: 2438 - protein, 120 aa, Artificial Sequence
  Synthetic
QVQLQQWGAGLLKPSETLSLTCAVYGGSFSGYYWSWIRQPPGKCLEWIGDIDASGSTKYNPSLKSRVTISLDTSKNQFSLKLNSVTAADTAVYFCARKKYSTVWSYFDNWGQGTLVTVSS

SEQ ID NO: 2439 - protein, 106 aa, Artificial Sequence
  Synthetic
SYELTQPSSVSVPPGQTASITCSGDKLGDKYASWYQQKPGQSPVLVIYQDRKRPSGVPERFSGSNSGNTATLTISGTQAMDEADYYCQAWGSSTAVFGCGTKLTVL

SEQ ID NO: 2440 - protein, 984 aa, Artificial Sequence
  Synthetic
QVQLQQWGAGLLKPSETLSLTCAVYGGSFSGYYWSWIRQPPGKCLEWIGDIDASGSTKYNPSLKSRVTISLDTSKNQFSLKLNSVTAADTAVYFCARKKYSTVWSYFDNWGQGTLVTVSSGGGGSGGGGSGGGGSSYELTQPSSVSVPPGQTASITCSGDKLGDKYASWYQQKPGQSPVLVIYQDRKRPSGVPERFSGSNSGNTATLTISGTQAMDEADYYCQAWGSSTAVFGCGTKLTVLSGGGGSEVQLVESGGGLVQPGGSLKLSCAASGFTFNKYAMNWVRQAPGKGLEWVARIRSKYNNYATYYADSVKDRFTISRDDSKNTAYLQMNNLKTEDTAVYYCVRHGNFGNSYISYWAYWGQGTLVTVSSGGGGSGGGGSGGGGSQTVVTQEPSLTVSPGGTVTLTCGSSTGAVTSGNYPNWVQQKPGQAPRGLIGGTKFLAPGTPARFSGSLLGGKAALTLSGVQPEDEAEYYCVLWYSNRWVFGGGTKLTVLGGGGDKTHTCPPCPAPELLGGPSVFLFPPKPKDTLMISRTPEVTCVVVDVSHEDPEVKFNWYVDGVEVHNAKTKPCEEQYGSTYRCVSVLTVLHQDWLNGKEYKCKVSNKALPAPIEKTISKAKGQPREPQVYTLPPSREEMTKNQVSLTCLVKGFYPSDIAVEWESNGQPENNYKTTPPVLDSDGSFFLYSKLTVDKSRWQQGNVFSCSVMHEALHNHYTQKSLSLSPGKGGGGSGGGGSGGGGSGGGGSGGGGSGGGGSDKTHTCPPCPAPELLGGPSVFLFPPKPKDTLMISRTPEVTCVVVDVSHEDPEVKFNWYVDGVEVHNAKTKPCEEQYGSTYRCVSVLTVLHQDWLNGKEYKCKVSNKALPAPIEKTISKAKGQPREPQVYTLPPSREEMTKNQVSLTCLVKGFYPSDIAVEWESNGQPENNYKTTPPVLDSDGSFFLYSKLTVDKSRWQQGNVFSCSVMHEALHNHYTQKSLSLSPGK

SEQ ID NO: 2441 - protein, 984 aa, Artificial Sequence
  Synthetic
QVQLQQWGAGLLKPSETLSLTCAVYGGSFSGYYWSWIRQPPGKCLEWIGDIDASGSTKYNPSLKSRVTISLDTSKNQFSLKLNSVTAADTAVYFCARKKYSTVWSYFDNWGQGTLVTVSSGGGGSGGGGSGGGGSSYELTQPSSVSVPPGQTASITCSGDKLGDKYASWYQQKPGQSPVLVIYQDRKRPSGVPERFSGSNSGNTATLTISGTQAMDEADYYCQAWGSSTAVFGCGTKLTVLSGGGGSEVQLVESGGGLVQPGGSLKLSCAASGFTFNKYAINWVRQAPGKGLEWVARIRSKYNNYATYYADAVKDRFTISRDDSKNTVYLQMNNLKTEDTAVYYCARAGNFGSSYISYWAYWGQGTLVTVSSGGGGSGGGGSGGGGSQTVVTQEPSLTVSPGGTVTITCGSSTGAVTSGNYPNWVQKKPGQAPRGLIGGTKFLAPGTPARFSGSLSGGKAALTLSGVQPEDEAEYYCVLWYSNRWVFGSGTKLTVLGGGGDKTHTCPPCPAPELLGGPSVFLFPPKPKDTLMISRTPEVTCVVVDVSHEDPEVKFNWYVDGVEVHNAKTKPCEEQYGSTYRCVSVLTVLHQDWLNGKEYKCKVSNKALPAPIEKTISKAKGQPREPQVYTLPPSREEMTKNQVSLTCLVKGFYPSDIAVEWESNGQPENNYKTTPPVLDSDGSFFLYSKLTVDKSRWQQGNVFSCSVMHEALHNHYTQKSLSLSPGKGGGGSGGGGSGGGGSGGGGSGGGGSGGGGSDKTHTCPPCPAPELLGGPSVFLFPPKPKDTLMISRTPEVTCVVVDVSHEDPEVKFNWYVDGVEVHNAKTKPCEEQYGSTYRCVSVLTVLHQDWLNGKEYKCKVSNKALPAPIEKTISKAKGQPREPQVYTLPPSREEMTKNQVSLTCLVKGFYPSDIAVEWESNGQPENNYKTTPPVLDSDGSFFLYSKLTVDKSRWQQGNVFSCSVMHEALHNHYTQKSLSLSPGK

SEQ ID NO: 2442 - protein, 984 aa, Artificial Sequence
  Synthetic
QVQLQQWGAGLLKPSETLSLTCAVYGGSFSGYYWSWIRQPPGKCLEWIGDIDASGSTKYNPSLKSRVTISLDTSKNQFSLKLNSVTAADTAVYFCARKKYSTVWSYFDNWGQGTLVTVSSGGGGSGGGGSGGGGSSYELTQPSSVSVPPGQTASITCSGDKLGDKYASWYQQKPGQSPVLVIYQDRKRPSGVPERFSGSNSGNTATLTISGTQAMDEADYYCQAWGSSTAVFGCGTKLTVLSGGGGSEVQLVESGGGLVQPGGSLKLSCAASGFTFNKYAMNWVRQAPGKGLEWVARIRSKYNNYATYYAEAVKGRFTISRDDSKNTVYLQMNNLKTEDTAVYYCVRNENIGTSYISYWAYWGQGTLVTVSSGGGGSGGGGSGGGGSQTVVTQEPSLTVSPGGTVTITCGSSTGAVTSGNYPNWVQQKPGQAPRGLIGGTKFLAPGTPARFSGSLSGGKAALTLSGVQPEDEAEYYCVLWYSNRWVFGSGTKLTVLGGGGDKTHTCPPCPAPELLGGPSVFLFPPKPKDTLMISRTPEVTCVVVDVSHEDPEVKFNWYVDGVEVHNAKTKPCEEQYGSTYRCVSVLTVLHQDWLNGKEYKCKVSNKALPAPIEKTISKAKGQPREPQVYTLPPSREEMTKNQVSLTCLVKGFYPSDIAVEWESNGQPENNYKTTPPVLDSDGSFFLYSKLTVDKSRWQQGNVFSCSVMHEALHNHYTQKSLSLSPGKGGGGSGGGGSGGGGSGGGGSGGGGSGGGGSDKTHTCPPCPAPELLGGPSVFLFPPKPKDTLMISRTPEVTCVVVDVSHEDPEVKFNWYVDGVEVHNAKTKPCEEQYGSTYRCVSVLTVLHQDWLNGKEYKCKVSNKALPAPIEKTISKAKGQPREPQVYTLPPSREEMTKNQVSLTCLVKGFYPSDIAVEWESNGQPENNYKTTPPVLDSDGSFFLYSKLTVDKSRWQQGNVFSCSVMHEALHNHYTQKSLSLSPGK

SEQ ID NO: 2443 - protein, 984 aa, Artificial Sequence
  Synthetic
QVQLQQWGAGLLKPSETLSLTCAVYGGSFSGYYWSWIRQPPGKCLEWIGDIDASGSTKYNPSLKSRVTISLDTSKNQFSLKLNSVTAADTAVYFCARKKYSTVWSYFDNWGQGTLVTVSSGGGGSGGGGSGGGGSSYELTQPSSVSVPPGQTASITCSGDKLGDKYASWYQQKPGQSPVLVIYQDRKRPSGVPERFSGSNSGNTATLTISGTQAMDEADYYCQAWGSSTAVFGCGTKLTVLSGGGGSEVQLVESGGGLVQPGGSLKLSCAASGFTFNKYAMNWVRQAPGKGMEWVARIRSKYNNYATYYADAVKDRFTISRDDSKNTLYLQMNNLKTEDTAVYYCVRAGNFGSSYISYFAYWGQGTLVTVSSGGGGSGGGGSGGGGSQTVVTQEPSLTVSPGGTVTITCGSSTGAVTSGNYPNWIQKKPGQAPRGLIGGTKFLAPGTPARFSGSLEGGKAALTLSGVQPEDEAEYYCVLYYSNRWVFGSGTKLTVLGGGGDKTHTCPPCPAPELLGGPSVFLFPPKPKDTLMISRTPEVTCVVVDVSHEDPEVKFNWYVDGVEVHNAKTKPCEEQYGSTYRCVSVLTVLHQDWLNGKEYKCKVSNKALPAPIEKTISKAKGQPREPQVYTLPPSREEMTKNQVSLTCLVKGFYPSDIAVEWESNGQPENNYKTTPPVLDSDGSFFLYSKLTVDKSRWQQGNVFSCSVMHEALHNHYTQKSLSLSPGKGGGGSGGGGSGGGGSGGGGSGGGGSGGGGSDKTHTCPPCPAPELLGGPSVFLFPPKPKDTLMISRTPEVTCVVVDVSHEDPEVKFNWYVDGVEVHNAKTKPCEEQYGSTYRCVSVLTVLHQDWLNGKEYKCKVSNKALPAPIEKTISKAKGQPREPQVYTLPPSREEMTKNQVSLTCLVKGFYPSDIAVEWESNGQPENNYKTTPPVLDSDGSFFLYSKLTVDKSRWQQGNVFSCSVMHEALHNHYTQKSLSLSPGK

SEQ ID NO: 2444 - protein, 984 aa, Artificial Sequence
  Synthetic
QVQLQQWGAGLLKPSETLSLTCAVYGGSFSGYYWSWIRQPPGKCLEWIGDIDASGSTKYNPSLKSRVTISLDTSKNQFSLKLNSVTAADTAVYFCARKKYSTVWSYFDNWGQGTLVTVSSGGGGSGGGGSGGGGSSYELTQPSSVSVPPGQTASITCSGDKLGDKYASWYQQKPGQSPVLVIYQDRKRPSGVPERFSGSNSGNTATLTISGTQAMDEADYYCQAWGSSTAVFGCGTKLTVLSGGGGSEVQLVESGGGLVQPGGSLKLSCAASGFTFNKYAINWVREAPGKGLEWVARIRSKYNNYATYYADAVKDRFTISRDDSKNTAYLQMNNLKTEDTAVYYCVRNANFGTSYISYFAYWGQGTLVTVSSGGGGSGGGGSGGGGSQTVVTQEPSLTVSPGGTVTLTCGSSTGAVTSGNYPNWVQKKPGQAPRGLIGGTKFLAPGTPARFSGSLLGGKAALTLSGVQPEDEAEYYCVLWYSNRWVFGSGTKLTVLGGGGDKTHTCPPCPAPELLGGPSVFLFPPKPKDTLMISRTPEVTCVVVDVSHEDPEVKFNWYVDGVEVHNAKTKPCEEQYGSTYRCVSVLTVLHQDWLNGKEYKCKVSNKALPAPIEKTISKAKGQPREPQVYTLPPSREEMTKNQVSLTCLVKGFYPSDIAVEWESNGQPENNYKTTPPVLDSDGSFFLYSKLTVDKSRWQQGNVFSCSVMHEALHNHYTQKSLSLSPGKGGGGSGGGGSGGGGSGGGGSGGGGSGGGGSDKTHTCPPCPAPELLGGPSVFLFPPKPKDTLMISRTPEVTCVVVDVSHEDPEVKFNWYVDGVEVHNAKTKPCEEQYGSTYRCVSVLTVLHQDWLNGKEYKCKVSNKALPAPIEKTISKAKGQPREPQVYTLPPSREEMTKNQVSLTCLVKGFYPSDIAVEWESNGQPENNYKTTPPVLDSDGSFFLYSKLTVDKSRWQQGNVFSCSVMHEALHNHYTQKSLSLSPGK

SEQ ID NO: 2445 - protein, 984 aa, Artificial Sequence
  Synthetic
QVQLQQWGAGLLKPSETLSLTCAVYGGSFSGYYWSWIRQPPGKCLEWIGDIDASGSTKYNPSLKSRVTISLDTSKNQFSLKLNSVTAADTAVYFCARKKYSTVWSYFDNWGQGTLVTVSSGGGGSGGGGSGGGGSSYELTQPSSVSVPPGQTASITCSGDKLGDKYASWYQQKPGQSPVLVIYQDRKRPSGVPERFSGSNSGNTATLTISGTQAMDEADYYCQAWGSSTAVFGCGTKLTVLSGGGGSEVQLVESGGGLVQPGGSLKLSCAASGFTFNKYAMNWVRQAPGKGMEWVARIRSKYNNYATYYADAVKDRFTISRDDSKNTLYLQMNNLKTEDTAVYYCVRAGNFGTSYISYWAYWGQGTLVTVSSGGGGSGGGGSGGGGSQTVVTQEPSLTVSPGGTVTITCGSSTGAVTSGNYPNWVQKKPGQAPRGLIGGTKFLAPGTPARFSGSLSGGKAALTLSGVQPEDEAEYYCVLWYSNRWVFGSGTKLTVLGGGGDKTHTCPPCPAPELLGGPSVFLFPPKPKDTLMISRTPEVTCVVVDVSHEDPEVKFNWYVDGVEVHNAKTKPCEEQYGSTYRCVSVLTVLHQDWLNGKEYKCKVSNKALPAPIEKTISKAKGQPREPQVYTLPPSREEMTKNQVSLTCLVKGFYPSDIAVEWESNGQPENNYKTTPPVLDSDGSFFLYSKLTVDKSRWQQGNVFSCSVMHEALHNHYTQKSLSLSPGKGGGGSGGGGSGGGGSGGGGSGGGGSGGGGSDKTHTCPPCPAPELLGGPSVFLFPPKPKDTLMISRTPEVTCVVVDVSHEDPEVKFNWYVDGVEVHNAKTKPCEEQYGSTYRCVSVLTVLHQDWLNGKEYKCKVSNKALPAPIEKTISKAKGQPREPQVYTLPPSREEMTKNQVSLTCLVKGFYPSDIAVEWESNGQPENNYKTTPPVLDSDGSFFLYSKLTVDKSRWQQGNVFSCSVMHEALHNHYTQKSLSLSPGK

SEQ ID NO: 2446 - protein, 5 aa, Artificial Sequence
  Synthetic
DYYMY

SEQ ID NO: 2447 - protein, 17 aa, Artificial Sequence
  Synthetic
IISDGGYYTYYSDIIKG

SEQ ID NO: 2448 - protein, 12 aa, Artificial Sequence
  Synthetic
GFPLLRHGAMDY

SEQ ID NO: 2449 - protein, 11 aa, Artificial Sequence
  Synthetic
KASQNVDTNVA

SEQ ID NO: 2450 - protein, 7 aa, Artificial Sequence
  Synthetic
SASYRYS

SEQ ID NO: 2451 - protein, 9 aa, Artificial Sequence
  Synthetic
QQYDSYPYT

SEQ ID NO: 2452 - protein, 121 aa, Artificial Sequence
  Synthetic
QVQLVESGGGLVKPGESLRLSCAASGFTFSDYYMYWVRQAPGKGLEWVAIISDGGYYTYYSDIIKGRFTISRDNAKNSLYLQMNSLKAEDTAVYYCARGFPLLRHGAMDYWGQGTLVTVSS

SEQ ID NO: 2453 - protein, 107 aa, Artificial Sequence
  Synthetic
DIQMTQSPSSLSASVGDRVTITCKASQNVDTNVAWYQQKPGQAPKSLIYSASYRYSDVPSRFSGSASGTDFTLTISSVQSEDFATYYCQQYDSYPYTFGGGTKLEIK

SEQ ID NO: 2454 - protein, 107 aa, Artificial Sequence
  Synthetic
EIQMTQSPSSLSASVGDRVTITCKASQNVDTNVAWYQQKPGQAPKSLIYSASYRYSDVPSRFSGSASGTDFTLTISSVQSEDFATYYCQQYDSYPYTFGGGTKLEIK

SEQ ID NO: 2455 - protein, 5 aa, Artificial Sequence
  Synthetic
DYYMY

SEQ ID NO: 2456 - protein, 17 aa, Artificial Sequence
  Synthetic
IISDGGYYTYYSDIIKG

SEQ ID NO: 2457 - protein, 12 aa, Artificial Sequence
  Synthetic
GFPLLRHGAMDY

SEQ ID NO: 2458 - protein, 11 aa, Artificial Sequence
  Synthetic
KASQNVDTNVA

SEQ ID NO: 2459 - protein, 7 aa, Artificial Sequence
  Synthetic
SASYVYW

SEQ ID NO: 2460 - protein, 9 aa, Artificial Sequence
  Synthetic
QQYDQQLIT

SEQ ID NO: 2461 - protein, 121 aa, Artificial Sequence
  Synthetic
QVQLVESGGGLVKPGESLRLSCAASGFTFSDYYMYWVRQAPGKCLEWVAIISDGGYYTYYSDIIKGRFTISRDNAKNSLYLQMNSLKAEDTAVYYCARGFPLLRHGAMDYWGQGTLVTVSS

SEQ ID NO: 2462 - protein, 107 aa, Artificial Sequence
  Synthetic
DIQMTQSPSSLSASVGDRVTITCKASQNVDTNVAWYQQKPGQAPKSLIYSASYVYWDVPSRFSGSASGTDFTLTISSVQSEDFATYYCQQYDQQLITFGCGTKLEIK

SEQ ID NO: 2463 - protein, 107 aa, Artificial Sequence
  Synthetic
EIQMTQSPSSLSASVGDRVTITCKASQNVDTNVAWYQQKPGQAPKSLIYSASYVYWDVPSRFSGSASGTDFTLTISSVQSEDFATYYCQQYDQQLITFGCGTKLEIK

SEQ ID NO: 2464 - protein, 498 aa, Artificial Sequence
  Synthetic
QVQLVESGGGLVKPGESLRLSCAASGFTFSDYYMYWVRQAPGKGLEWVAIISDGGYYTYYSDIIKGRFTISRDNAKNSLYLQMNSLKAEDTAVYYCARGFPLLRHGAMDYWGQGTLVTVSSGGGGSGGGGSGGGGSDIQMTQSPSSLSASVGDRVTITCKASQNVDTNVAWYQQKPGQAPKSLIYSASYRYSDVPSRFSGSASGTDFTLTISSVQSEDFATYYCQQYDSYPYTFGGGTKLEIKSGGGGSEVQLVESGGGLVQPGGSLKLSCAASGFTFNKYAMNWVRQAPGKGLEWVARIRSKYNNYATYYADSVKDRFTISRDDSKNTAYLQMNNLKTEDTAVYYCVRHGNFGNSYISYWAYWGQGTLVTVSSGGGGSGGGGSGGGGSQTVVTQEPSLTVSPGGTVTLTCGSSTGAVTSGNYPNWVQQKPGQAPRGLIGGTKFLAPGTPARFSGSLLGGKAALTLSGVQPEDEAEYYCVLWYSNRWVFGGGTKLTVL

SEQ ID NO: 2465 - protein, 498 aa, Artificial Sequence
  Synthetic
QVQLVESGGGLVKPGESLRLSCAASGFTFSDYYMYWVRQAPGKGLEWVAIISDGGYYTYYSDIIKGRFTISRDNAKNSLYLQMNSLKAEDTAVYYCARGFPLLRHGAMDYWGQGTLVTVSSGGGGSGGGGSGGGGSDIQMTQSPSSLSASVGDRVTITCKASQNVDTNVAWYQQKPGQAPKSLIYSASYRYSDVPSRFSGSASGTDFTLTISSVQSEDFATYYCQQYDSYPYTFGGGTKLEIKSGGGGSEVQLVESGGGLVQPGGSLKLSCAASGFTFNKYAINWVRQAPGKGLEWVARIRSKYNNYATYYADAVKDRFTISRDDSKNTVYLQMNNLKTEDTAVYYCARAGNFGSSYISYWAYWGQGTLVTVSSGGGGSGGGGSGGGGSQTVVTQEPSLTVSPGGTVTITCGSSTGAVTSGNYPNWVQKKPGQAPRGLIGGTKFLAPGTPARFSGSLSGGKAALTLSGVQPEDEAEYYCVLWYSNRWVFGSGTKLTVL

SEQ ID NO: 2466 - protein, 498 aa, Artificial Sequence
  Synthetic
QVQLVESGGGLVKPGESLRLSCAASGFTFSDYYMYWVRQAPGKGLEWVAIISDGGYYTYYSDIIKGRFTISRDNAKNSLYLQMNSLKAEDTAVYYCARGFPLLRHGAMDYWGQGTLVTVSSGGGGSGGGGSGGGGSDIQMTQSPSSLSASVGDRVTITCKASQNVDTNVAWYQQKPGQAPKSLIYSASYRYSDVPSRFSGSASGTDFTLTISSVQSEDFATYYCQQYDSYPYTFGGGTKLEIKSGGGGSEVQLVESGGGLVQPGGSLKLSCAASGFTFNKYAMNWVRQAPGKGLEWVARIRSKYNNYATYYAEAVKGRFTISRDDSKNTVYLQMNNLKTEDTAVYYCVRNENIGTSYISYWAYWGQGTLVTVSSGGGGSGGGGSGGGGSQTVVTQEPSLTVSPGGTVTITCGSSTGAVTSGNYPNWVQQKPGQAPRGLIGGTKFLAPGTPARFSGSLSGGKAALTLSGVQPEDEAEYYCVLWYSNRWVFGSGTKLTVL

SEQ ID NO: 2467 - protein, 498 aa, Artificial Sequence
  Synthetic
QVQLVESGGGLVKPGESLRLSCAASGFTFSDYYMYWVRQAPGKGLEWVAIISDGGYYTYYSDIIKGRFTISRDNAKNSLYLQMNSLKAEDTAVYYCARGFPLLRHGAMDYWGQGTLVTVSSGGGGSGGGGSGGGGSDIQMTQSPSSLSASVGDRVTITCKASQNVDTNVAWYQQKPGQAPKSLIYSASYRYSDVPSRFSGSASGTDFTLTISSVQSEDFATYYCQQYDSYPYTFGGGTKLEIKSGGGGSEVQLVESGGGLVQPGGSLKLSCAASGFTFNKYAMNWVRQAPGKGMEWVARIRSKYNNYATYYADAVKDRFTISRDDSKNTLYLQMNNLKTEDTAVYYCVRAGNFGSSYISYFAYWGQGTLVTVSSGGGGSGGGGSGGGGSQTVVTQEPSLTVSPGGTVTITCGSSTGAVTSGNYPNWIQKKPGQAPRGLIGGTKFLAPGTPARFSGSLEGGKAALTLSGVQPEDEAEYYCVLYYSNRWVFGSGTKLTVL

SEQ ID NO: 2468 - protein, 498 aa, Artificial Sequence
  Synthetic
QVQLVESGGGLVKPGESLRLSCAASGFTFSDYYMYWVRQAPGKGLEWVAIISDGGYYTYYSDIIKGRFTISRDNAKNSLYLQMNSLKAEDTAVYYCARGFPLLRHGAMDYWGQGTLVTVSSGGGGSGGGGSGGGGSDIQMTQSPSSLSASVGDRVTITCKASQNVDTNVAWYQQKPGQAPKSLIYSASYRYSDVPSRFSGSASGTDFTLTISSVQSEDFATYYCQQYDSYPYTFGGGTKLEIKSGGGGSEVQLVESGGGLVQPGGSLKLSCAASGFTFNKYAMNWVRQAPGKGMEWVARIRSKYNNYATYYADAVKDRFTISRDDSKNTLYLQMNNLKTEDTAVYYCVRAGNFGTSYISYWAYWGQGTLVTVSSGGGGSGGGGSGGGGSQTVVTQEPSLTVSPGGTVTITCGSSTGAVTSGNYPNWVQKKPGQAPRGLIGGTKFLAPGTPARFSGSLSGGKAALTLSGVQPEDEAEYYCVLWYSNRWVFGSGTKLTVL

SEQ ID NO: 2469 - protein, 498 aa, Artificial Sequence
  Synthetic
QVQLVESGGGLVKPGESLRLSCAASGFTFSDYYMYWVRQAPGKGLEWVAIISDGGYYTYYSDIIKGRFTISRDNAKNSLYLQMNSLKAEDTAVYYCARGFPLLRHGAMDYWGQGTLVTVSSGGGGSGGGGSGGGGSDIQMTQSPSSLSASVGDRVTITCKASQNVDTNVAWYQQKPGQAPKSLIYSASYRYSDVPSRFSGSASGTDFTLTISSVQSEDFATYYCQQYDSYPYTFGGGTKLEIKSGGGGSEVQLVESGGGLVQPGGSLKLSCAASGFTFNKYAINWVREAPGKGLEWVARIRSKYNNYATYYADAVKDRFTISRDDSKNTAYLQMNNLKTEDTAVYYCVRNANFGTSYISYFAYWGQGTLVTVSSGGGGSGGGGSGGGGSQTVVTQEPSLTVSPGGTVTLTCGSSTGAVTSGNYPNWVQKKPGQAPRGLIGGTKFLAPGTPARFSGSLLGGKAALTLSGVQPEDEAEYYCVLWYSNRWVFGSGTKLTVL

SEQ ID NO: 2470 - protein, 986 aa, Artificial Sequence
  Synthetic
QVQLVESGGGLVKPGESLRLSCAASGFTFSDYYMYWVRQAPGKCLEWVAIISDGGYYTYYSDIIKGRFTISRDNAKNSLYLQMNSLKAEDTAVYYCARGFPLLRHGAMDYWGQGTLVTVSSGGGGSGGGGSGGGGSDIQMTQSPSSLSASVGDRVTITCKASQNVDTNVAWYQQKPGQAPKSLIYSASYVYWDVPSRFSGSASGTDFTLTISSVQSEDFATYYCQQYDQQLITFGCGTKLEIKSGGGGSEVQLVESGGGLVQPGGSLKLSCAASGFTFNKYAMNWVRQAPGKGLEWVARIRSKYNNYATYYADSVKDRFTISRDDSKNTAYLQMNNLKTEDTAVYYCVRHGNFGNSYISYWAYWGQGTLVTVSSGGGGSGGGGSGGGGSQTVVTQEPSLTVSPGGTVTLTCGSSTGAVTSGNYPNWVQQKPGQAPRGLIGGTKFLAPGTPARFSGSLLGGKAALTLSGVQPEDEAEYYCVLWYSNRWVFGGGTKLTVLGGGGDKTHTCPPCPAPELLGGPSVFLFPPKPKDTLMISRTPEVTCVVVDVSHEDPEVKFNWYVDGVEVHNAKTKPCEEQYGSTYRCVSVLTVLHQDWLNGKEYKCKVSNKALPAPIEKTISKAKGQPREPQVYTLPPSREEMTKNQVSLTCLVKGFYPSDIAVEWESNGQPENNYKTTPPVLDSDGSFFLYSKLTVDKSRWQQGNVFSCSVMHEALHNHYTQKSLSLSPGKGGGGSGGGGSGGGGSGGGGSGGGGSGGGGSDKTHTCPPCPAPELLGGPSVFLFPPKPKDTLMISRTPEVTCVVVDVSHEDPEVKFNWYVDGVEVHNAKTKPCEEQYGSTYRCVSVLTVLHQDWLNGKEYKCKVSNKALPAPIEKTISKAKGQPREPQVYTLPPSREEMTKNQVSLTCLVKGFYPSDIAVEWESNGQPENNYKTTPPVLDSDGSFFLYSKLTVDKSRWQQGNVFSCSVMHEALHNHYTQKSLSLSPGK

SEQ ID NO: 2471 - protein, 986 aa, Artificial Sequence
  Synthetic
QVQLVESGGGLVKPGESLRLSCAASGFTFSDYYMYWVRQAPGKCLEWVAIISDGGYYTYYSDIIKGRFTISRDNAKNSLYLQMNSLKAEDTAVYYCARGFPLLRHGAMDYWGQGTLVTVSSGGGGSGGGGSGGGGSDIQMTQSPSSLSASVGDRVTITCKASQNVDTNVAWYQQKPGQAPKSLIYSASYVYWDVPSRFSGSASGTDFTLTISSVQSEDFATYYCQQYDQQLITFGCGTKLEIKSGGGGSEVQLVESGGGLVQPGGSLKLSCAASGFTFNKYAINWVRQAPGKGLEWVARIRSKYNNYATYYADAVKDRFTISRDDSKNTVYLQMNNLKTEDTAVYYCARAGNFGSSYISYWAYWGQGTLVTVSSGGGGSGGGGSGGGGSQTVVTQEPSLTVSPGGTVTITCGSSTGAVTSGNYPNWVQKKPGQAPRGLIGGTKFLAPGTPARFSGSLSGGKAALTLSGVQPEDEAEYYCVLWYSNRWVFGSGTKLTVLGGGGDKTHTCPPCPAPELLGGPSVFLFPPKPKDTLMISRTPEVTCVVVDVSHEDPEVKFNWYVDGVEVHNAKTKPCEEQYGSTYRCVSVLTVLHQDWLNGKEYKCKVSNKALPAPIEKTISKAKGQPREPQVYTLPPSREEMTKNQVSLTCLVKGFYPSDIAVEWESNGQPENNYKTTPPVLDSDGSFFLYSKLTVDKSRWQQGNVFSCSVMHEALHNHYTQKSLSLSPGKGGGGSGGGGSGGGGSGGGGSGGGGSGGGGSDKTHTCPPCPAPELLGGPSVFLFPPKPKDTLMISRTPEVTCVVVDVSHEDPEVKFNWYVDGVEVHNAKTKPCEEQYGSTYRCVSVLTVLHQDWLNGKEYKCKVSNKALPAPIEKTISKAKGQPREPQVYTLPPSREEMTKNQVSLTCLVKGFYPSDIAVEWESNGQPENNYKTTPPVLDSDGSFFLYSKLTVDKSRWQQGNVFSCSVMHEALHNHYTQKSLSLSPGK

SEQ ID NO: 2472 - protein, 986 aa, Artificial Sequence
  Synthetic
QVQLVESGGGLVKPGESLRLSCAASGFTFSDYYMYWVRQAPGKCLEWVAIISDGGYYTYYSDIIKGRFTISRDNAKNSLYLQMNSLKAEDTAVYYCARGFPLLRHGAMDYWGQGTLVTVSSGGGGSGGGGSGGGGSDIQMTQSPSSLSASVGDRVTITCKASQNVDTNVAWYQQKPGQAPKSLIYSASYVYWDVPSRFSGSASGTDFTLTISSVQSEDFATYYCQQYDQQLITFGCGTKLEIKSGGGGSEVQLVESGGGLVQPGGSLKLSCAASGFTFNKYAMNWVRQAPGKGLEWVARIRSKYNNYATYYAEAVKGRFTISRDDSKNTVYLQMNNLKTEDTAVYYCVRNENIGTSYISYWAYWGQGTLVTVSSGGGGSGGGGSGGGGSQTVVTQEPSLTVSPGGTVTITCGSSTGAVTSGNYPNWVQQKPGQAPRGLIGGTKFLAPGTPARFSGSLSGGKAALTLSGVQPEDEAEYYCVLWYSNRWVFGSGTKLTVLGGGGDKTHTCPPCPAPELLGGPSVFLFPPKPKDTLMISRTPEVTCVVVDVSHEDPEVKFNWYVDGVEVHNAKTKPCEEQYGSTYRCVSVLTVLHQDWLNGKEYKCKVSNKALPAPIEKTISKAKGQPREPQVYTLPPSREEMTKNQVSLTCLVKGFYPSDIAVEWESNGQPENNYKTTPPVLDSDGSFFLYSKLTVDKSRWQQGNVFSCSVMHEALHNHYTQKSLSLSPGKGGGGSGGGGSGGGGSGGGGSGGGGSGGGGSDKTHTCPPCPAPELLGGPSVFLFPPKPKDTLMISRTPEVTCVVVDVSHEDPEVKFNWYVDGVEVHNAKTKPCEEQYGSTYRCVSVLTVLHQDWLNGKEYKCKVSNKALPAPIEKTISKAKGQPREPQVYTLPPSREEMTKNQVSLTCLVKGFYPSDIAVEWESNGQPENNYKTTPPVLDSDGSFFLYSKLTVDKSRWQQGNVFSCSVMHEALHNHYTQKSLSLSPGK

SEQ ID NO: 2473 - protein, 986 aa, Artificial Sequence
  Synthetic
QVQLVESGGGLVKPGESLRLSCAASGFTFSDYYMYWVRQAPGKCLEWVAIISDGGYYTYYSDIIKGRFTISRDNAKNSLYLQMNSLKAEDTAVYYCARGFPLLRHGAMDYWGQGTLVTVSSGGGGSGGGGSGGGGSDIQMTQSPSSLSASVGDRVTITCKASQNVDTNVAWYQQKPGQAPKSLIYSASYVYWDVPSRFSGSASGTDFTLTISSVQSEDFATYYCQQYDQQLITFGCGTKLEIKSGGGGSEVQLVESGGGLVQPGGSLKLSCAASGFTFNKYAMNWVRQAPGKGMEWVARIRSKYNNYATYYADAVKDRFTISRDDSKNTLYLQMNNLKTEDTAVYYCVRAGNFGSSYISYFAYWGQGTLVTVSSGGGGSGGGGSGGGGSQTVVTQEPSLTVSPGGTVTITCGSSTGAVTSGNYPNWIQKKPGQAPRGLIGGTKFLAPGTPARFSGSLEGGKAALTLSGVQPEDEAEYYCVLYYSNRWVFGSGTKLTVLGGGGDKTHTCPPCPAPELLGGPSVFLFPPKPKDTLMISRTPEVTCVVVDVSHEDPEVKFNWYVDGVEVHNAKTKPCEEQYGSTYRCVSVLTVLHQDWLNGKEYKCKVSNKALPAPIEKTISKAKGQPREPQVYTLPPSREEMTKNQVSLTCLVKGFYPSDIAVEWESNGQPENNYKTTPPVLDSDGSFFLYSKLTVDKSRWQQGNVFSCSVMHEALHNHYTQKSLSLSPGKGGGGSGGGGSGGGGSGGGGSGGGGSGGGGSDKTHTCPPCPAPELLGGPSVFLFPPKPKDTLMISRTPEVTCVVVDVSHEDPEVKFNWYVDGVEVHNAKTKPCEEQYGSTYRCVSVLTVLHQDWLNGKEYKCKVSNKALPAPIEKTISKAKGQPREPQVYTLPPSREEMTKNQVSLTCLVKGFYPSDIAVEWESNGQPENNYKTTPPVLDSDGSFFLYSKLTVDKSRWQQGNVFSCSVMHEALHNHYTQKSLSLSPGK

SEQ ID NO: 2474 - protein, 986 aa, Artificial Sequence
  Synthetic
QVQLVESGGGLVKPGESLRLSCAASGFTFSDYYMYWVRQAPGKCLEWVAIISDGGYYTYYSDIIKGRFTISRDNAKNSLYLQMNSLKAEDTAVYYCARGFPLLRHGAMDYWGQGTLVTVSSGGGGSGGGGSGGGGSDIQMTQSPSSLSASVGDRVTITCKASQNVDTNVAWYQQKPGQAPKSLIYSASYVYWDVPSRFSGSASGTDFTLTISSVQSEDFATYYCQQYDQQLITFGCGTKLEIKSGGGGSEVQLVESGGGLVQPGGSLKLSCAASGFTFNKYAMNWVRQAPGKGMEWVARIRSKYNNYATYYADAVKDRFTISRDDSKNTLYLQMNNLKTEDTAVYYCVRAGNFGTSYISYWAYWGQGTLVTVSSGGGGSGGGGSGGGGSQTVVTQEPSLTVSPGGTVTITCGSSTGAVTSGNYPNWVQKKPGQAPRGLIGGTKFLAPGTPARFSGSLSGGKAALTLSGVQPEDEAEYYCVLWYSNRWVFGSGTKLTVLGGGGDKTHTCPPCPAPELLGGPSVFLFPPKPKDTLMISRTPEVTCVVVDVSHEDPEVKFNWYVDGVEVHNAKTKPCEEQYGSTYRCVSVLTVLHQDWLNGKEYKCKVSNKALPAPIEKTISKAKGQPREPQVYTLPPSREEMTKNQVSLTCLVKGFYPSDIAVEWESNGQPENNYKTTPPVLDSDGSFFLYSKLTVDKSRWQQGNVFSCSVMHEALHNHYTQKSLSLSPGKGGGGSGGGGSGGGGSGGGGSGGGGSGGGGSDKTHTCPPCPAPELLGGPSVFLFPPKPKDTLMISRTPEVTCVVVDVSHEDPEVKFNWYVDGVEVHNAKTKPCEEQYGSTYRCVSVLTVLHQDWLNGKEYKCKVSNKALPAPIEKTISKAKGQPREPQVYTLPPSREEMTKNQVSLTCLVKGFYPSDIAVEWESNGQPENNYKTTPPVLDSDGSFFLYSKLTVDKSRWQQGNVFSCSVMHEALHNHYTQKSLSLSPGK

SEQ ID NO: 2475 - protein, 986 aa, Artificial Sequence
  Synthetic
QVQLVESGGGLVKPGESLRLSCAASGFTFSDYYMYWVRQAPGKCLEWVAIISDGGYYTYYSDIIKGRFTISRDNAKNSLYLQMNSLKAEDTAVYYCARGFPLLRHGAMDYWGQGTLVTVSSGGGGSGGGGSGGGGSDIQMTQSPSSLSASVGDRVTITCKASQNVDTNVAWYQQKPGQAPKSLIYSASYVYWDVPSRFSGSASGTDFTLTISSVQSEDFATYYCQQYDQQLITFGCGTKLEIKSGGGGSEVQLVESGGGLVQPGGSLKLSCAASGFTFNKYAINWVREAPGKGLEWVARIRSKYNNYATYYADAVKDRFTISRDDSKNTAYLQMNNLKTEDTAVYYCVRNANFGTSYISYFAYWGQGTLVTVSSGGGGSGGGGSGGGGSQTVVTQEPSLTVSPGGTVTLTCGSSTGAVTSGNYPNWVQKKPGQAPRGLIGGTKFLAPGTPARFSGSLLGGKAALTLSGVQPEDEAEYYCVLWYSNRWVFGSGTKLTVLGGGGDKTHTCPPCPAPELLGGPSVFLFPPKPKDTLMISRTPEVTCVVVDVSHEDPEVKFNWYVDGVEVHNAKTKPCEEQYGSTYRCVSVLTVLHQDWLNGKEYKCKVSNKALPAPIEKTISKAKGQPREPQVYTLPPSREEMTKNQVSLTCLVKGFYPSDIAVEWESNGQPENNYKTTPPVLDSDGSFFLYSKLTVDKSRWQQGNVFSCSVMHEALHNHYTQKSLSLSPGKGGGGSGGGGSGGGGSGGGGSGGGGSGGGGSDKTHTCPPCPAPELLGGPSVFLFPPKPKDTLMISRTPEVTCVVVDVSHEDPEVKFNWYVDGVEVHNAKTKPCEEQYGSTYRCVSVLTVLHQDWLNGKEYKCKVSNKALPAPIEKTISKAKGQPREPQVYTLPPSREEMTKNQVSLTCLVKGFYPSDIAVEWESNGQPENNYKTTPPVLDSDGSFFLYSKLTVDKSRWQQGNVFSCSVMHEALHNHYTQKSLSLSPGK

SEQ ID NO: 2476-2504 - skipped (29 entries)

SEQ ID NO: 2505 - protein, 1235 aa, Artificial Sequence
  Synthetic
QVQLVQSGAEVKKPGASVKVSCKASGYTFTSYWMHWVRQAPGQCLEWIGYITPSTGYTEYNQKFKGRVTMTRDKSTSTVYMELSSLTSEDTAVYYCARVHDYDRAMEYWGQGTTVTVSSGGGGSGGGGSGGGGSDIQMTQSPSSLSASVGDRVTITCKASQDINKYIAWYQQKPGKGPKLLIYYTSTLQPGVPSRFSGSGSGTDFTFTISSLQPEDIATYYCLQYASYPFTFGCGTRLEIKSGGGGSQVQLVQSGAEVKKPGASVKVSCKASGYTFTSYGISWVRQAPGQCLEWMGWISAYSGNAIYAQKLQGRVTMTRDTSTSTAYMELRSLRSDDTAVYYCARDPDYYGSGSYSDYWGQGTLVTVSSGGGGSGGGGSGGGGSEIVLTQSPATLSVSPGERATLSCRASQSVSSNLAWYQQKPGQAPRLLIYGASSRATGIPARFSGSGSGTEFTLTISSLQSEDFAVYYCQQYHSWPLLTFGCGTKVEIKSGGGGSEVQLVESGGGLVQPGGSLKLSCAASGFTFNKYAMNWVRQAPGKGLEWVARIRSKYNNYATYYADSVKDRFTISRDDSKNTAYLQMNNLKTEDTAVYYCVRHGNFGNSYISYWAYWGQGTLVTVSSGGGGSGGGGSGGGGSQTVVTQEPSLTVSPGGTVTLTCGSSTGAVTSGNYPNWVQQKPGQAPRGLIGGTKFLAPGTPARFSGSLLGGKAALTLSGVQPEDEAEYYCVLWYSNRWVFGGGTKLTVLGGGGDKTHTCPPCPAPELLGGPSVFLFPPKPKDTLMISRTPEVTCVVVDVSHEDPEVKFNWYVDGVEVHNAKTKPCEEQYGSTYRCVSVLTVLHQDWLNGKEYKCKVSNKALPAPIEKTISKAKGQPREPQVYTLPPSREEMTKNQVSLTCLVKGFYPSDIAVEWESNGQPENNYKTTPPVLDSDGSFFLYSKLTVDKSRWQQGNVFSCSVMHEALHNHYTQKSLSLSPGKGGGGSGGGGSGGGGSGGGGSGGGGSGGGGSDKTHTCPPCPAPELLGGPSVFLFPPKPKDTLMISRTPEVTCVVVDVSHEDPEVKFNWYVDGVEVHNAKTKPCEEQYGSTYRCVSVLTVLHQDWLNGKEYKCKVSNKALPAPIEKTISKAKGQPREPQVYTLPPSREEMTKNQVSLTCLVKGFYPSDIAVEWESNGQPENNYKTTPPVLDSDGSFFLYSKLTVDKSRWQQGNVFSCSVMHEALHNHYTQKSLSLSPGK

SEQ ID NO: 2506 - protein, 1235 aa, Artificial Sequence
  Synthetic
QVQLVQSGAEVKKPGASVKVSCKASGYTFTSYWMHWVRQAPGQCLEWIGYITPSTGYTEYNQKFKGRVTMTRDKSTSTVYMELSSLTSEDTAVYYCARVHDYDRAMEYWGQGTTVTVSSGGGGSGGGGSGGGGSDIQMTQSPSSLSASVGDRVTITCKASQDINKYIAWYQQKPGKGPKLLIYYTSTLQPGVPSRFSGSGSGTDFTFTISSLQPEDIATYYCLQYASYPFTFGCGTRLEIKSGGGGSQVQLVQSGAEVKKPGASVKVSCKASGYTFTSYGISWVRQAPGQCLEWMGWISAYSGNAIYAQKLQGRVTMTRDTSTSTAYMELRSLRSDDTAVYYCARDPDYYGSGSYSDYWGQGTLVTVSSGGGGSGGGGSGGGGSEIVLTQSPATLSVSPGERATLSCRASQSVSSNLAWYQQKPGQAPRLLIYGASSRATGIPARFSGSGSGTEFTLTISSLQSEDFAVYYCQQYHSWPLLTFGCGTKVEIKSGGGGSEVQLVESGGGLVQPGGSLKLSCAASGFTFNKYAINWVRQAPGKGLEWVARIRSKYNNYATYYADAVKDRFTISRDDSKNTVYLQMNNLKTEDTAVYYCARAGNFGSSYISYWAYWGQGTLVTVSSGGGGSGGGGSGGGGSQTVVTQEPSLTVSPGGTVTITCGSSTGAVTSGNYPNWVQKKPGQAPRGLIGGTKFLAPGTPARFSGSLSGGKAALTLSGVQPEDEAEYYCVLWYSNRWVFGSGTKLTVLGGGGDKTHTCPPCPAPELLGGPSVFLFPPKPKDTLMISRTPEVTCVVVDVSHEDPEVKFNWYVDGVEVHNAKTKPCEEQYGSTYRCVSVLTVLHQDWLNGKEYKCKVSNKALPAPIEKTISKAKGQPREPQVYTLPPSREEMTKNQVSLTCLVKGFYPSDIAVEWESNGQPENNYKTTPPVLDSDGSFFLYSKLTVDKSRWQQGNVFSCSVMHEALHNHYTQKSLSLSPGKGGGGSGGGGSGGGGSGGGGSGGGGSGGGGSDKTHTCPPCPAPELLGGPSVFLFPPKPKDTLMISRTPEVTCVVVDVSHEDPEVKFNWYVDGVEVHNAKTKPCEEQYGSTYRCVSVLTVLHQDWLNGKEYKCKVSNKALPAPIEKTISKAKGQPREPQVYTLPPSREEMTKNQVSLTCLVKGFYPSDIAVEWESNGQPENNYKTTPPVLDSDGSFFLYSKLTVDKSRWQQGNVFSCSVMHEALHNHYTQKSLSLSPGK

SEQ ID NO: 2507 - protein, 1235 aa, Artificial Sequence
  Synthetic
QVQLVQSGAEVKKPGASVKVSCKASGYTFTSYWMHWVRQAPGQCLEWIGYITPSTGYTEYNQKFKGRVTMTRDKSTSTVYMELSSLTSEDTAVYYCARVHDYDRAMEYWGQGTTVTVSSGGGGSGGGGSGGGGSDIQMTQSPSSLSASVGDRVTITCKASQDINKYIAWYQQKPGKGPKLLIYYTSTLQPGVPSRFSGSGSGTDFTFTISSLQPEDIATYYCLQYASYPFTFGCGTRLEIKSGGGGSQVQLVQSGAEVKKPGASVKVSCKASGYTFTSYGISWVRQAPGQCLEWMGWISAYSGNAIYAQKLQGRVTMTRDTSTSTAYMELRSLRSDDTAVYYCARDPDYYGSGSYSDYWGQGTLVTVSSGGGGSGGGGSGGGGSEIVLTQSPATLSVSPGERATLSCRASQSVSSNLAWYQQKPGQAPRLLIYGASSRATGIPARFSGSGSGTEFTLTISSLQSEDFAVYYCQQYHSWPLLTFGCGTKVEIKSGGGGSEVQLVESGGGLVQPGGSLKLSCAASGFTFNKYAMNWVRQAPGKGLEWVARIRSKYNNYATYYAEAVKGRFTISRDDSKNTVYLQMNNLKTEDTAVYYCVRNENIGTSYISYWAYWGQGTLVTVSSGGGGSGGGGSGGGGSQTVVTQEPSLTVSPGGTVTITCGSSTGAVTSGNYPNWVQQKPGQAPRGLIGGTKFLAPGTPARFSGSLSGGKAALTLSGVQPEDEAEYYCVLWYSNRWVFGSGTKLTVLGGGGDKTHTCPPCPAPELLGGPSVFLFPPKPKDTLMISRTPEVTCVVVDVSHEDPEVKFNWYVDGVEVHNAKTKPCEEQYGSTYRCVSVLTVLHQDWLNGKEYKCKVSNKALPAPIEKTISKAKGQPREPQVYTLPPSREEMTKNQVSLTCLVKGFYPSDIAVEWESNGQPENNYKTTPPVLDSDGSFFLYSKLTVDKSRWQQGNVFSCSVMHEALHNHYTQKSLSLSPGKGGGGSGGGGSGGGGSGGGGSGGGGSGGGGSDKTHTCPPCPAPELLGGPSVFLFPPKPKDTLMISRTPEVTCVVVDVSHEDPEVKFNWYVDGVEVHNAKTKPCEEQYGSTYRCVSVLTVLHQDWLNGKEYKCKVSNKALPAPIEKTISKAKGQPREPQVYTLPPSREEMTKNQVSLTCLVKGFYPSDIAVEWESNGQPENNYKTTPPVLDSDGSFFLYSKLTVDKSRWQQGNVFSCSVMHEALHNHYTQKSLSLSPGK

SEQ ID NO: 2508 - protein, 1235 aa, Artificial Sequence
  Synthetic
QVQLVQSGAEVKKPGASVKVSCKASGYTFTSYWMHWVRQAPGQCLEWIGYITPSTGYTEYNQKFKGRVTMTRDKSTSTVYMELSSLTSEDTAVYYCARVHDYDRAMEYWGQGTTVTVSSGGGGSGGGGSGGGGSDIQMTQSPSSLSASVGDRVTITCKASQDINKYIAWYQQKPGKGPKLLIYYTSTLQPGVPSRFSGSGSGTDFTFTISSLQPEDIATYYCLQYASYPFTFGCGTRLEIKSGGGGSQVQLVQSGAEVKKPGASVKVSCKASGYTFTSYGISWVRQAPGQCLEWMGWISAYSGNAIYAQKLQGRVTMTRDTSTSTAYMELRSLRSDDTAVYYCARDPDYYGSGSYSDYWGQGTLVTVSSGGGGSGGGGSGGGGSEIVLTQSPATLSVSPGERATLSCRASQSVSSNLAWYQQKPGQAPRLLIYGASSRATGIPARFSGSGSGTEFTLTISSLQSEDFAVYYCQQYHSWPLLTFGCGTKVEIKSGGGGSEVQLVESGGGLVQPGGSLKLSCAASGFTFNKYAMNWVRQAPGKGMEWVARIRSKYNNYATYYADAVKDRFTISRDDSKNTLYLQMNNLKTEDTAVYYCVRAGNFGSSYISYFAYWGQGTLVTVSSGGGGSGGGGSGGGGSQTVVTQEPSLTVSPGGTVTITCGSSTGAVTSGNYPNWIQKKPGQAPRGLIGGTKFLAPGTPARFSGSLEGGKAALTLSGVQPEDEAEYYCVLYYSNRWVFGSGTKLTVLGGGGDKTHTCPPCPAPELLGGPSVFLFPPKPKDTLMISRTPEVTCVVVDVSHEDPEVKFNWYVDGVEVHNAKTKPCEEQYGSTYRCVSVLTVLHQDWLNGKEYKCKVSNKALPAPIEKTISKAKGQPREPQVYTLPPSREEMTKNQVSLTCLVKGFYPSDIAVEWESNGQPENNYKTTPPVLDSDGSFFLYSKLTVDKSRWQQGNVFSCSVMHEALHNHYTQKSLSLSPGKGGGGSGGGGSGGGGSGGGGSGGGGSGGGGSDKTHTCPPCPAPELLGGPSVFLFPPKPKDTLMISRTPEVTCVVVDVSHEDPEVKFNWYVDGVEVHNAKTKPCEEQYGSTYRCVSVLTVLHQDWLNGKEYKCKVSNKALPAPIEKTISKAKGQPREPQVYTLPPSREEMTKNQVSLTCLVKGFYPSDIAVEWESNGQPENNYKTTPPVLDSDGSFFLYSKLTVDKSRWQQGNVFSCSVMHEALHNHYTQKSLSLSPGK

SEQ ID NO: 2509 - protein, 1235 aa, Artificial Sequence
  Synthetic
QVQLVQSGAEVKKPGASVKVSCKASGYTFTSYWMHWVRQAPGQCLEWIGYITPSTGYTEYNQKFKGRVTMTRDKSTSTVYMELSSLTSEDTAVYYCARVHDYDRAMEYWGQGTTVTVSSGGGGSGGGGSGGGGSDIQMTQSPSSLSASVGDRVTITCKASQDINKYIAWYQQKPGKGPKLLIYYTSTLQPGVPSRFSGSGSGTDFTFTISSLQPEDIATYYCLQYASYPFTFGCGTRLEIKSGGGGSQVQLVQSGAEVKKPGASVKVSCKASGYTFTSYGISWVRQAPGQCLEWMGWISAYSGNAIYAQKLQGRVTMTRDTSTSTAYMELRSLRSDDTAVYYCARDPDYYGSGSYSDYWGQGTLVTVSSGGGGSGGGGSGGGGSEIVLTQSPATLSVSPGERATLSCRASQSVSSNLAWYQQKPGQAPRLLIYGASSRATGIPARFSGSGSGTEFTLTISSLQSEDFAVYYCQQYHSWPLLTFGCGTKVEIKSGGGGSEVQLVESGGGLVQPGGSLKLSCAASGFTFNKYAMNWVRQAPGKGMEWVARIRSKYNNYATYYADAVKDRFTISRDDSKNTLYLQMNNLKTEDTAVYYCVRAGNFGTSYISYWAYWGQGTLVTVSSGGGGSGGGGSGGGGSQTVVTQEPSLTVSPGGTVTITCGSSTGAVTSGNYPNWVQKKPGQAPRGLIGGTKFLAPGTPARFSGSLSGGKAALTLSGVQPEDEAEYYCVLWYSNRWVFGSGTKLTVLGGGGDKTHTCPPCPAPELLGGPSVFLFPPKPKDTLMISRTPEVTCVVVDVSHEDPEVKFNWYVDGVEVHNAKTKPCEEQYGSTYRCVSVLTVLHQDWLNGKEYKCKVSNKALPAPIEKTISKAKGQPREPQVYTLPPSREEMTKNQVSLTCLVKGFYPSDIAVEWESNGQPENNYKTTPPVLDSDGSFFLYSKLTVDKSRWQQGNVFSCSVMHEALHNHYTQKSLSLSPGKGGGGSGGGGSGGGGSGGGGSGGGGSGGGGSDKTHTCPPCPAPELLGGPSVFLFPPKPKDTLMISRTPEVTCVVVDVSHEDPEVKFNWYVDGVEVHNAKTKPCEEQYGSTYRCVSVLTVLHQDWLNGKEYKCKVSNKALPAPIEKTISKAKGQPREPQVYTLPPSREEMTKNQVSLTCLVKGFYPSDIAVEWESNGQPENNYKTTPPVLDSDGSFFLYSKLTVDKSRWQQGNVFSCSVMHEALHNHYTQKSLSLSPGK

SEQ ID NO: 2510 - protein, 1235 aa, Artificial Sequence
  Synthetic
QVQLVQSGAEVKKPGASVKVSCKASGYTFTSYWMHWVRQAPGQCLEWIGYITPSTGYTEYNQKFKGRVTMTRDKSTSTVYMELSSLTSEDTAVYYCARVHDYDRAMEYWGQGTTVTVSSGGGGSGGGGSGGGGSDIQMTQSPSSLSASVGDRVTITCKASQDINKYIAWYQQKPGKGPKLLIYYTSTLQPGVPSRFSGSGSGTDFTFTISSLQPEDIATYYCLQYASYPFTFGCGTRLEIKSGGGGSQVQLVQSGAEVKKPGASVKVSCKASGYTFTSYGISWVRQAPGQCLEWMGWISAYSGNAIYAQKLQGRVTMTRDTSTSTAYMELRSLRSDDTAVYYCARDPDYYGSGSYSDYWGQGTLVTVSSGGGGSGGGGSGGGGSEIVLTQSPATLSVSPGERATLSCRASQSVSSNLAWYQQKPGQAPRLLIYGASSRATGIPARFSGSGSGTEFTLTISSLQSEDFAVYYCQQYHSWPLLTFGCGTKVEIKSGGGGSEVQLVESGGGLVQPGGSLKLSCAASGFTFNKYAINWVREAPGKGLEWVARIRSKYNNYATYYADAVKDRFTISRDDSKNTAYLQMNNLKTEDTAVYYCVRNANFGTSYISYFAYWGQGTLVTVSSGGGGSGGGGSGGGGSQTVVTQEPSLTVSPGGTVTLTCGSSTGAVTSGNYPNWVQKKPGQAPRGLIGGTKFLAPGTPARFSGSLLGGKAALTLSGVQPEDEAEYYCVLWYSNRWVFGSGTKLTVLGGGGDKTHTCPPCPAPELLGGPSVFLFPPKPKDTLMISRTPEVTCVVVDVSHEDPEVKFNWYVDGVEVHNAKTKPCEEQYGSTYRCVSVLTVLHQDWLNGKEYKCKVSNKALPAPIEKTISKAKGQPREPQVYTLPPSREEMTKNQVSLTCLVKGFYPSDIAVEWESNGQPENNYKTTPPVLDSDGSFFLYSKLTVDKSRWQQGNVFSCSVMHEALHNHYTQKSLSLSPGKGGGGSGGGGSGGGGSGGGGSGGGGSGGGGSDKTHTCPPCPAPELLGGPSVFLFPPKPKDTLMISRTPEVTCVVVDVSHEDPEVKFNWYVDGVEVHNAKTKPCEEQYGSTYRCVSVLTVLHQDWLNGKEYKCKVSNKALPAPIEKTISKAKGQPREPQVYTLPPSREEMTKNQVSLTCLVKGFYPSDIAVEWESNGQPENNYKTTPPVLDSDGSFFLYSKLTVDKSRWQQGNVFSCSVMHEALHNHYTQKSLSLSPGK

SEQ ID NO: 2511 - protein, 1510 aa, Artificial Sequence
  Synthetic
QVQLVQSGAEVKKPGASVKVSCKASGYTFTSYGISWVRQAPGQCLEWMGWISAYSGNAIYAQKLQGRVTMTRDTSTSTAYMELRSLRSDDTAVYYCARDPDYYGSGSYSDYWGQGTLVTVSSGGGGSGGGGSGGGGSEIVLTQSPATLSVSPGERATLSCRASQSVSSNLAWYQQKPGQAPRLLIYGASSRATGIPARFSGSGSGTEFTLTISSLQSEDFAVYYCQQYHSWPLLTFGCGTKVEIKSGGGGSEVQLVESGGGLVQPGGSLKLSCAASGFTFNKYAMNWVRQAPGKGLEWVARIRSKYNNYATYYADSVKDRFTISRDDSKNTAYLQMNNLKTEDTAVYYCVRHGNFGNSYISYWAYWGQGTLVTVSSGGGGSGGGGSGGGGSQTVVTQEPSLTVSPGGTVTLTCGSSTGAVTSGNYPNWVQQKPGQAPRGLIGGTKFLAPGTPARFSGSLLGGKAALTLSGVQPEDEAEYYCVLWYSNRWVFGGGTKLTVLGGGGSGGGGSGGGGSDKTHTCPPCPAPELLGGPSVFLFPPKPKDTLMISRTPEVTCVVVDVSHEDPEVKFNWYVDGVEVHNAKTKPCEEQYGSTYRCVSVLTVLHQDWLNGKEYKCKVSNKALPAPIEKTISKAKGQPREPQVYTLPPSREEMTKNQVSLTCLVKGFYPSDIAVEWESNGQPENNYKTTPPVLDSDGSFFLYSKLTVDKSRWQQGNVFSCSVMHEALHNHYTQKSLSLSPGKGGGGSGGGGSGGGGSGGGGSGGGGSGGGGSDKTHTCPPCPAPELLGGPSVFLFPPKPKDTLMISRTPEVTCVVVDVSHEDPEVKFNWYVDGVEVHNAKTKPCEEQYGSTYRCVSVLTVLHQDWLNGKEYKCKVSNKALPAPIEKTISKAKGQPREPQVYTLPPSREEMTKNQVSLTCLVKGFYPSDIAVEWESNGQPENNYKTTPPVLDSDGSFFLYSKLTVDKSRWQQGNVFSCSVMHEALHNHYTQKSLSLSPGKGGGGSGGGGSGGGGSQVQLVQSGAEVKKPGASVKVSCKASGYTFTSYWMHWVRQAPGQCLEWIGYITPSTGYTEYNQKFKGRVTMTRDKSTSTVYMELSSLTSEDTAVYYCARVHDYDRAMEYWGQGTTVTVSSGGGGSGGGGSGGGGSDIQMTQSPSSLSASVGDRVTITCKASQDINKYIAWYQQKPGKGPKLLIYYTSTLQPGVPSRFSGSGSGTDFTFTISSLQPEDIATYYCLQYASYPFTFGCGTRLEIKSGGGGSEVQLVESGGGLVQPGGSLKLSCAASGFTFNKYAMNWVRQAPGKGLEWVARIRSKYNNYATYYADSVKDRFTISRDDSKNTAYLQMNNLKTEDTAVYYCVRHGNFGNSYISYWAYWGQGTLVTVSSGGGGSGGGGSGGGGSQTVVTQEPSLTVSPGGTVTLTCGSSTGAVTSGNYPNWVQQKPGQAPRGLIGGTKFLAPGTPARFSGSLLGGKAALTLSGVQPEDEAEYYCVLWYSNRWVFGGGTKLTVL

SEQ ID NO: 2512 - protein, 1510 aa, Artificial Sequence
  Synthetic
QVQLVQSGAEVKKPGASVKVSCKASGYTFTSYGISWVRQAPGQCLEWMGWISAYSGNAIYAQKLQGRVTMTRDTSTSTAYMELRSLRSDDTAVYYCARDPDYYGSGSYSDYWGQGTLVTVSSGGGGSGGGGSGGGGSEIVLTQSPATLSVSPGERATLSCRASQSVSSNLAWYQQKPGQAPRLLIYGASSRATGIPARFSGSGSGTEFTLTISSLQSEDFAVYYCQQYHSWPLLTFGCGTKVEIKSGGGGSEVQLVESGGGLVQPGGSLKLSCAASGFTFNKYAINWVRQAPGKGLEWVARIRSKYNNYATYYADAVKDRFTISRDDSKNTVYLQMNNLKTEDTAVYYCARAGNFGSSYISYWAYWGQGTLVTVSSGGGGSGGGGSGGGGSQTVVTQEPSLTVSPGGTVTITCGSSTGAVTSGNYPNWVQKKPGQAPRGLIGGTKFLAPGTPARFSGSLSGGKAALTLSGVQPEDEAEYYCVLWYSNRWVFGSGTKLTVLGGGGSGGGGSGGGGSDKTHTCPPCPAPELLGGPSVFLFPPKPKDTLMISRTPEVTCVVVDVSHEDPEVKFNWYVDGVEVHNAKTKPCEEQYGSTYRCVSVLTVLHQDWLNGKEYKCKVSNKALPAPIEKTISKAKGQPREPQVYTLPPSREEMTKNQVSLTCLVKGFYPSDIAVEWESNGQPENNYKTTPPVLDSDGSFFLYSKLTVDKSRWQQGNVFSCSVMHEALHNHYTQKSLSLSPGKGGGGSGGGGSGGGGSGGGGSGGGGSGGGGSDKTHTCPPCPAPELLGGPSVFLFPPKPKDTLMISRTPEVTCVVVDVSHEDPEVKFNWYVDGVEVHNAKTKPCEEQYGSTYRCVSVLTVLHQDWLNGKEYKCKVSNKALPAPIEKTISKAKGQPREPQVYTLPPSREEMTKNQVSLTCLVKGFYPSDIAVEWESNGQPENNYKTTPPVLDSDGSFFLYSKLTVDKSRWQQGNVFSCSVMHEALHNHYTQKSLSLSPGKGGGGSGGGGSGGGGSQVQLVQSGAEVKKPGASVKVSCKASGYTFTSYWMHWVRQAPGQCLEWIGYITPSTGYTEYNQKFKGRVTMTRDKSTSTVYMELSSLTSEDTAVYYCARVHDYDRAMEYWGQGTTVTVSSGGGGSGGGGSGGGGSDIQMTQSPSSLSASVGDRVTITCKASQDINKYIAWYQQKPGKGPKLLIYYTSTLQPGVPSRFSGSGSGTDFTFTISSLQPEDIATYYCLQYASYPFTFGCGTRLEIKSGGGGSEVQLVESGGGLVQPGGSLKLSCAASGFTFNKYAINWVRQAPGKGLEWVARIRSKYNNYATYYADAVKDRFTISRDDSKNTVYLQMNNLKTEDTAVYYCARAGNFGSSYISYWAYWGQGTLVTVSSGGGGSGGGGSGGGGSQTVVTQEPSLTVSPGGTVTITCGSSTGAVTSGNYPNWVQKKPGQAPRGLIGGTKFLAPGTPARFSGSLSGGKAALTLSGVQPEDEAEYYCVLWYSNRWVFGSGTKLTVL

SEQ ID NO: 2513 - protein, 1510 aa, Artificial Sequence
  Synthetic
QVQLVQSGAEVKKPGASVKVSCKASGYTFTSYGISWVRQAPGQCLEWMGWISAYSGNAIYAQKLQGRVTMTRDTSTSTAYMELRSLRSDDTAVYYCARDPDYYGSGSYSDYWGQGTLVTVSSGGGGSGGGGSGGGGSEIVLTQSPATLSVSPGERATLSCRASQSVSSNLAWYQQKPGQAPRLLIYGASSRATGIPARFSGSGSGTEFTLTISSLQSEDFAVYYCQQYHSWPLLTFGCGTKVEIKSGGGGSEVQLVESGGGLVQPGGSLKLSCAASGFTFNKYAMNWVRQAPGKGLEWVARIRSKYNNYATYYAEAVKGRFTISRDDSKNTVYLQMNNLKTEDTAVYYCVRNENIGTSYISYWAYWGQGTLVTVSSGGGGSGGGGSGGGGSQTVVTQEPSLTVSPGGTVTITCGSSTGAVTSGNYPNWVQQKPGQAPRGLIGGTKFLAPGTPARFSGSLSGGKAALTLSGVQPEDEAEYYCVLWYSNRWVFGSGTKLTVLGGGGSGGGGSGGGGSDKTHTCPPCPAPELLGGPSVFLFPPKPKDTLMISRTPEVTCVVVDVSHEDPEVKFNWYVDGVEVHNAKTKPCEEQYGSTYRCVSVLTVLHQDWLNGKEYKCKVSNKALPAPIEKTISKAKGQPREPQVYTLPPSREEMTKNQVSLTCLVKGFYPSDIAVEWESNGQPENNYKTTPPVLDSDGSFFLYSKLTVDKSRWQQGNVFSCSVMHEALHNHYTQKSLSLSPGKGGGGSGGGGSGGGGSGGGGSGGGGSGGGGSDKTHTCPPCPAPELLGGPSVFLFPPKPKDTLMISRTPEVTCVVVDVSHEDPEVKFNWYVDGVEVHNAKTKPCEEQYGSTYRCVSVLTVLHQDWLNGKEYKCKVSNKALPAPIEKTISKAKGQPREPQVYTLPPSREEMTKNQVSLTCLVKGFYPSDIAVEWESNGQPENNYKTTPPVLDSDGSFFLYSKLTVDKSRWQQGNVFSCSVMHEALHNHYTQKSLSLSPGKGGGGSGGGGSGGGGSQVQLVQSGAEVKKPGASVKVSCKASGYTFTSYWMHWVRQAPGQCLEWIGYITPSTGYTEYNQKFKGRVTMTRDKSTSTVYMELSSLTSEDTAVYYCARVHDYDRAMEYWGQGTTVTVSSGGGGSGGGGSGGGGSDIQMTQSPSSLSASVGDRVTITCKASQDINKYIAWYQQKPGKGPKLLIYYTSTLQPGVPSRFSGSGSGTDFTFTISSLQPEDIATYYCLQYASYPFTFGCGTRLEIKSGGGGSEVQLVESGGGLVQPGGSLKLSCAASGFTFNKYAMNWVRQAPGKGLEWVARIRSKYNNYATYYAEAVKGRFTISRDDSKNTVYLQMNNLKTEDTAVYYCVRNENIGTSYISYWAYWGQGTLVTVSSGGGGSGGGGSGGGGSQTVVTQEPSLTVSPGGTVTITCGSSTGAVTSGNYPNWVQQKPGQAPRGLIGGTKFLAPGTPARFSGSLSGGKAALTLSGVQPEDEAEYYCVLWYSNRWVFGSGTKLTVL

SEQ ID NO: 2514 - protein, 1510 aa, Artificial Sequence
  Synthetic
QVQLVQSGAEVKKPGASVKVSCKASGYTFTSYGISWVRQAPGQCLEWMGWISAYSGNAIYAQKLQGRVTMTRDTSTSTAYMELRSLRSDDTAVYYCARDPDYYGSGSYSDYWGQGTLVTVSSGGGGSGGGGSGGGGSEIVLTQSPATLSVSPGERATLSCRASQSVSSNLAWYQQKPGQAPRLLIYGASSRATGIPARFSGSGSGTEFTLTISSLQSEDFAVYYCQQYHSWPLLTFGCGTKVEIKSGGGGSEVQLVESGGGLVQPGGSLKLSCAASGFTFNKYAMNWVRQAPGKGMEWVARIRSKYNNYATYYADAVKDRFTISRDDSKNTLYLQMNNLKTEDTAVYYCVRAGNFGSSYISYFAYWGQGTLVTVSSGGGGSGGGGSGGGGSQTVVTQEPSLTVSPGGTVTITCGSSTGAVTSGNYPNWIQKKPGQAPRGLIGGTKFLAPGTPARFSGSLEGGKAALTLSGVQPEDEAEYYCVLYYSNRWVFGSGTKLTVLGGGGSGGGGSGGGGSDKTHTCPPCPAPELLGGPSVFLFPPKPKDTLMISRTPEVTCVVVDVSHEDPEVKFNWYVDGVEVHNAKTKPCEEQYGSTYRCVSVLTVLHQDWLNGKEYKCKVSNKALPAPIEKTISKAKGQPREPQVYTLPPSREEMTKNQVSLTCLVKGFYPSDIAVEWESNGQPENNYKTTPPVLDSDGSFFLYSKLTVDKSRWQQGNVFSCSVMHEALHNHYTQKSLSLSPGKGGGGSGGGGSGGGGSGGGGSGGGGSGGGGSDKTHTCPPCPAPELLGGPSVFLFPPKPKDTLMISRTPEVTCVVVDVSHEDPEVKFNWYVDGVEVHNAKTKPCEEQYGSTYRCVSVLTVLHQDWLNGKEYKCKVSNKALPAPIEKTISKAKGQPREPQVYTLPPSREEMTKNQVSLTCLVKGFYPSDIAVEWESNGQPENNYKTTPPVLDSDGSFFLYSKLTVDKSRWQQGNVFSCSVMHEALHNHYTQKSLSLSPGKGGGGSGGGGSGGGGSQVQLVQSGAEVKKPGASVKVSCKASGYTFTSYWMHWVRQAPGQCLEWIGYITPSTGYTEYNQKFKGRVTMTRDKSTSTVYMELSSLTSEDTAVYYCARVHDYDRAMEYWGQGTTVTVSSGGGGSGGGGSGGGGSDIQMTQSPSSLSASVGDRVTITCKASQDINKYIAWYQQKPGKGPKLLIYYTSTLQPGVPSRFSGSGSGTDFTFTISSLQPEDIATYYCLQYASYPFTFGCGTRLEIKSGGGGSEVQLVESGGGLVQPGGSLKLSCAASGFTFNKYAMNWVRQAPGKGMEWVARIRSKYNNYATYYADAVKDRFTISRDDSKNTLYLQMNNLKTEDTAVYYCVRAGNFGSSYISYFAYWGQGTLVTVSSGGGGSGGGGSGGGGSQTVVTQEPSLTVSPGGTVTITCGSSTGAVTSGNYPNWIQKKPGQAPRGLIGGTKFLAPGTPARFSGSLEGGKAALTLSGVQPEDEAEYYCVLYYSNRWVFGSGTKLTVL

SEQ ID NO: 2515 - protein, 1510 aa, Artificial Sequence
  Synthetic
QVQLVQSGAEVKKPGASVKVSCKASGYTFTSYGISWVRQAPGQCLEWMGWISAYSGNAIYAQKLQGRVTMTRDTSTSTAYMELRSLRSDDTAVYYCARDPDYYGSGSYSDYWGQGTLVTVSSGGGGSGGGGSGGGGSEIVLTQSPATLSVSPGERATLSCRASQSVSSNLAWYQQKPGQAPRLLIYGASSRATGIPARFSGSGSGTEFTLTISSLQSEDFAVYYCQQYHSWPLLTFGCGTKVEIKSGGGGSEVQLVESGGGLVQPGGSLKLSCAASGFTFNKYAMNWVRQAPGKGMEWVARIRSKYNNYATYYADAVKDRFTISRDDSKNTLYLQMNNLKTEDTAVYYCVRAGNFGTSYISYWAYWGQGTLVTVSSGGGGSGGGGSGGGGSQTVVTQEPSLTVSPGGTVTITCGSSTGAVTSGNYPNWVQKKPGQAPRGLIGGTKFLAPGTPARFSGSLSGGKAALTLSGVQPEDEAEYYCVLWYSNRWVFGSGTKLTVLGGGGSGGGGSGGGGSDKTHTCPPCPAPELLGGPSVFLFPPKPKDTLMISRTPEVTCVVVDVSHEDPEVKFNWYVDGVEVHNAKTKPCEEQYGSTYRCVSVLTVLHQDWLNGKEYKCKVSNKALPAPIEKTISKAKGQPREPQVYTLPPSREEMTKNQVSLTCLVKGFYPSDIAVEWESNGQPENNYKTTPPVLDSDGSFFLYSKLTVDKSRWQQGNVFSCSVMHEALHNHYTQKSLSLSPGKGGGGSGGGGSGGGGSGGGGSGGGGSGGGGSDKTHTCPPCPAPELLGGPSVFLFPPKPKDTLMISRTPEVTCVVVDVSHEDPEVKFNWYVDGVEVHNAKTKPCEEQYGSTYRCVSVLTVLHQDWLNGKEYKCKVSNKALPAPIEKTISKAKGQPREPQVYTLPPSREEMTKNQVSLTCLVKGFYPSDIAVEWESNGQPENNYKTTPPVLDSDGSFFLYSKLTVDKSRWQQGNVFSCSVMHEALHNHYTQKSLSLSPGKGGGGSGGGGSGGGGSQVQLVQSGAEVKKPGASVKVSCKASGYTFTSYWMHWVRQAPGQCLEWIGYITPSTGYTEYNQKFKGRVTMTRDKSTSTVYMELSSLTSEDTAVYYCARVHDYDRAMEYWGQGTTVTVSSGGGGSGGGGSGGGGSDIQMTQSPSSLSASVGDRVTITCKASQDINKYIAWYQQKPGKGPKLLIYYTSTLQPGVPSRFSGSGSGTDFTFTISSLQPEDIATYYCLQYASYPFTFGCGTRLEIKSGGGGSEVQLVESGGGLVQPGGSLKLSCAASGFTFNKYAMNWVRQAPGKGMEWVARIRSKYNNYATYYADAVKDRFTISRDDSKNTLYLQMNNLKTEDTAVYYCVRAGNFGTSYISYWAYWGQGTLVTVSSGGGGSGGGGSGGGGSQTVVTQEPSLTVSPGGTVTITCGSSTGAVTSGNYPNWVQKKPGQAPRGLIGGTKFLAPGTPARFSGSLSGGKAALTLSGVQPEDEAEYYCVLWYSNRWVFGSGTKLTVL

SEQ ID NO: 2516 - protein, 1510 aa, Artificial Sequence
  Synthetic
QVQLVQSGAEVKKPGASVKVSCKASGYTFTSYGISWVRQAPGQCLEWMGWISAYSGNAIYAQKLQGRVTMTRDTSTSTAYMELRSLRSDDTAVYYCARDPDYYGSGSYSDYWGQGTLVTVSSGGGGSGGGGSGGGGSEIVLTQSPATLSVSPGERATLSCRASQSVSSNLAWYQQKPGQAPRLLIYGASSRATGIPARFSGSGSGTEFTLTISSLQSEDFAVYYCQQYHSWPLLTFGCGTKVEIKSGGGGSEVQLVESGGGLVQPGGSLKLSCAASGFTFNKYAINWVREAPGKGLEWVARIRSKYNNYATYYADAVKDRFTISRDDSKNTAYLQMNNLKTEDTAVYYCVRNANFGTSYISYFAYWGQGTLVTVSSGGGGSGGGGSGGGGSQTVVTQEPSLTVSPGGTVTLTCGSSTGAVTSGNYPNWVQKKPGQAPRGLIGGTKFLAPGTPARFSGSLLGGKAALTLSGVQPEDEAEYYCVLWYSNRWVFGSGTKLTVLGGGGSGGGGSGGGGSDKTHTCPPCPAPELLGGPSVFLFPPKPKDTLMISRTPEVTCVVVDVSHEDPEVKFNWYVDGVEVHNAKTKPCEEQYGSTYRCVSVLTVLHQDWLNGKEYKCKVSNKALPAPIEKTISKAKGQPREPQVYTLPPSREEMTKNQVSLTCLVKGFYPSDIAVEWESNGQPENNYKTTPPVLDSDGSFFLYSKLTVDKSRWQQGNVFSCSVMHEALHNHYTQKSLSLSPGKGGGGSGGGGSGGGGSGGGGSGGGGSGGGGSDKTHTCPPCPAPELLGGPSVFLFPPKPKDTLMISRTPEVTCVVVDVSHEDPEVKFNWYVDGVEVHNAKTKPCEEQYGSTYRCVSVLTVLHQDWLNGKEYKCKVSNKALPAPIEKTISKAKGQPREPQVYTLPPSREEMTKNQVSLTCLVKGFYPSDIAVEWESNGQPENNYKTTPPVLDSDGSFFLYSKLTVDKSRWQQGNVFSCSVMHEALHNHYTQKSLSLSPGKGGGGSGGGGSGGGGSQVQLVQSGAEVKKPGASVKVSCKASGYTFTSYWMHWVRQAPGQCLEWIGYITPSTGYTEYNQKFKGRVTMTRDKSTSTVYMELSSLTSEDTAVYYCARVHDYDRAMEYWGQGTTVTVSSGGGGSGGGGSGGGGSDIQMTQSPSSLSASVGDRVTITCKASQDINKYIAWYQQKPGKGPKLLIYYTSTLQPGVPSRFSGSGSGTDFTFTISSLQPEDIATYYCLQYASYPFTFGCGTRLEIKSGGGGSEVQLVESGGGLVQPGGSLKLSCAASGFTFNKYAINWVREAPGKGLEWVARIRSKYNNYATYYADAVKDRFTISRDDSKNTAYLQMNNLKTEDTAVYYCVRNANFGTSYISYFAYWGQGTLVTVSSGGGGSGGGGSGGGGSQTVVTQEPSLTVSPGGTVTLTCGSSTGAVTSGNYPNWVQKKPGQAPRGLIGGTKFLAPGTPARFSGSLLGGKAALTLSGVQPEDEAEYYCVLWYSNRWVFGSGTKLTVL

SEQ ID NO: 2517 - protein, 1236 aa, Artificial Sequence
  Synthetic
DIQMTQSPSSLSASVGDRVTITCKASQDVSTAVAWYQQKPGKAPKLLIYSASYRYTGVPDRFTGSGSGTDFTLTISSLQPEDFATYYCQQHYSTPPYTFGCGTKVEIKRGGGGSGGGGSGGGGSQVQLVQSGAEVKKPGASVKVSCKASGYAFSSSWMNWVRQAPGQCLEWIGRIYPGDADAKYNAKFKGKATLTADKSTSTAYMELSSLRSEDTAVYYCARSTMIATGAMDYWGQGTLVTVSSSGGGGSQVQLVQSGAEVKKPGASVKVSCKASGYTFTNHIIHWVRQAPGQCLEWMGYINPYPGYHAYNEKFQGRATMTSDTSTSTVYMELSSLRSEDTAVYYCARDGYYRDTDVLDYWGQGTLVTVSSGGGGSGGGGSGGGGSDIQMTQSPSSLSASVGDRVTITCQASQDISNYLNWYQQKPGKAPKLLIYYTSRLHTGVPSRFSGSGSGTDFTFTISSLEPEDIATYYCQQGNTLPWTFGCGTKVEIKSGGGGSEVQLVESGGGLVQPGGSLKLSCAASGFTFNKYAMNWVRQAPGKGLEWVARIRSKYNNYATYYADSVKDRFTISRDDSKNTAYLQMNNLKTEDTAVYYCVRHGNFGNSYISYWAYWGQGTLVTVSSGGGGSGGGGSGGGGSQTVVTQEPSLTVSPGGTVTLTCGSSTGAVTSGNYPNWVQQKPGQAPRGLIGGTKFLAPGTPARFSGSLLGGKAALTLSGVQPEDEAEYYCVLWYSNRWVFGGGTKLTVLGGGGDKTHTCPPCPAPELLGGPSVFLFPPKPKDTLMISRTPEVTCVVVDVSHEDPEVKFNWYVDGVEVHNAKTKPCEEQYGSTYRCVSVLTVLHQDWLNGKEYKCKVSNKALPAPIEKTISKAKGQPREPQVYTLPPSREEMTKNQVSLTCLVKGFYPSDIAVEWESNGQPENNYKTTPPVLDSDGSFFLYSKLTVDKSRWQQGNVFSCSVMHEALHNHYTQKSLSLSPGKGGGGSGGGGSGGGGSGGGGSGGGGSGGGGSDKTHTCPPCPAPELLGGPSVFLFPPKPKDTLMISRTPEVTCVVVDVSHEDPEVKFNWYVDGVEVHNAKTKPCEEQYGSTYRCVSVLTVLHQDWLNGKEYKCKVSNKALPAPIEKTISKAKGQPREPQVYTLPPSREEMTKNQVSLTCLVKGFYPSDIAVEWESNGQPENNYKTTPPVLDSDGSFFLYSKLTVDKSRWQQGNVFSCSVMHEALHNHYTQKSLSLSPGK

SEQ ID NO: 2518 - protein, 1236 aa, Artificial Sequence
  Synthetic
DIQMTQSPSSLSASVGDRVTITCKASQDVSTAVAWYQQKPGKAPKLLIYSASYRYTGVPDRFTGSGSGTDFTLTISSLQPEDFATYYCQQHYSTPPYTFGCGTKVEIKRGGGGSGGGGSGGGGSQVQLVQSGAEVKKPGASVKVSCKASGYAFSSSWMNWVRQAPGQCLEWIGRIYPGDADAKYNAKFKGKATLTADKSTSTAYMELSSLRSEDTAVYYCARSTMIATGAMDYWGQGTLVTVSSSGGGGSQVQLVQSGAEVKKPGASVKVSCKASGYTFTNHIIHWVRQAPGQCLEWMGYINPYPGYHAYNEKFQGRATMTSDTSTSTVYMELSSLRSEDTAVYYCARDGYYRDTDVLDYWGQGTLVTVSSGGGGSGGGGSGGGGSDIQMTQSPSSLSASVGDRVTITCQASQDISNYLNWYQQKPGKAPKLLIYYTSRLHTGVPSRFSGSGSGTDFTFTISSLEPEDIATYYCQQGNTLPWTFGCGTKVEIKSGGGGSEVQLVESGGGLVQPGGSLKLSCAASGFTFNKYAINWVRQAPGKGLEWVARIRSKYNNYATYYADAVKDRFTISRDDSKNTVYLQMNNLKTEDTAVYYCARAGNFGSSYISYWAYWGQGTLVTVSSGGGGSGGGGSGGGGSQTVVTQEPSLTVSPGGTVTITCGSSTGAVTSGNYPNWVQKKPGQAPRGLIGGTKFLAPGTPARFSGSLSGGKAALTLSGVQPEDEAEYYCVLWYSNRWVFGSGTKLTVLGGGGDKTHTCPPCPAPELLGGPSVFLFPPKPKDTLMISRTPEVTCVVVDVSHEDPEVKFNWYVDGVEVHNAKTKPCEEQYGSTYRCVSVLTVLHQDWLNGKEYKCKVSNKALPAPIEKTISKAKGQPREPQVYTLPPSREEMTKNQVSLTCLVKGFYPSDIAVEWESNGQPENNYKTTPPVLDSDGSFFLYSKLTVDKSRWQQGNVFSCSVMHEALHNHYTQKSLSLSPGKGGGGSGGGGSGGGGSGGGGSGGGGSGGGGSDKTHTCPPCPAPELLGGPSVFLFPPKPKDTLMISRTPEVTCVVVDVSHEDPEVKFNWYVDGVEVHNAKTKPCEEQYGSTYRCVSVLTVLHQDWLNGKEYKCKVSNKALPAPIEKTISKAKGQPREPQVYTLPPSREEMTKNQVSLTCLVKGFYPSDIAVEWESNGQPENNYKTTPPVLDSDGSFFLYSKLTVDKSRWQQGNVFSCSVMHEALHNHYTQKSLSLSPGK

SEQ ID NO: 2519 - protein, 1236 aa, Artificial Sequence
  Synthetic
DIQMTQSPSSLSASVGDRVTITCKASQDVSTAVAWYQQKPGKAPKLLIYSASYRYTGVPDRFTGSGSGTDFTLTISSLQPEDFATYYCQQHYSTPPYTFGCGTKVEIKRGGGGSGGGGSGGGGSQVQLVQSGAEVKKPGASVKVSCKASGYAFSSSWMNWVRQAPGQCLEWIGRIYPGDADAKYNAKFKGKATLTADKSTSTAYMELSSLRSEDTAVYYCARSTMIATGAMDYWGQGTLVTVSSSGGGGSQVQLVQSGAEVKKPGASVKVSCKASGYTFTNHIIHWVRQAPGQCLEWMGYINPYPGYHAYNEKFQGRATMTSDTSTSTVYMELSSLRSEDTAVYYCARDGYYRDTDVLDYWGQGTLVTVSSGGGGSGGGGSGGGGSDIQMTQSPSSLSASVGDRVTITCQASQDISNYLNWYQQKPGKAPKLLIYYTSRLHTGVPSRFSGSGSGTDFTFTISSLEPEDIATYYCQQGNTLPWTFGCGTKVEIKSGGGGSEVQLVESGGGLVQPGGSLKLSCAASGFTFNKYAMNWVRQAPGKGLEWVARIRSKYNNYATYYAEAVKGRFTISRDDSKNTVYLQMNNLKTEDTAVYYCVRNENIGTSYISYWAYWGQGTLVTVSSGGGGSGGGGSGGGGSQTVVTQEPSLTVSPGGTVTITCGSSTGAVTSGNYPNWVQQKPGQAPRGLIGGTKFLAPGTPARFSGSLSGGKAALTLSGVQPEDEAEYYCVLWYSNRWVFGSGTKLTVLGGGGDKTHTCPPCPAPELLGGPSVFLFPPKPKDTLMISRTPEVTCVVVDVSHEDPEVKFNWYVDGVEVHNAKTKPCEEQYGSTYRCVSVLTVLHQDWLNGKEYKCKVSNKALPAPIEKTISKAKGQPREPQVYTLPPSREEMTKNQVSLTCLVKGFYPSDIAVEWESNGQPENNYKTTPPVLDSDGSFFLYSKLTVDKSRWQQGNVFSCSVMHEALHNHYTQKSLSLSPGKGGGGSGGGGSGGGGSGGGGSGGGGSGGGGSDKTHTCPPCPAPELLGGPSVFLFPPKPKDTLMISRTPEVTCVVVDVSHEDPEVKFNWYVDGVEVHNAKTKPCEEQYGSTYRCVSVLTVLHQDWLNGKEYKCKVSNKALPAPIEKTISKAKGQPREPQVYTLPPSREEMTKNQVSLTCLVKGFYPSDIAVEWESNGQPENNYKTTPPVLDSDGSFFLYSKLTVDKSRWQQGNVFSCSVMHEALHNHYTQKSLSLSPGK

SEQ ID NO: 2520 - protein, 1236 aa, Artificial Sequence
  Synthetic
DIQMTQSPSSLSASVGDRVTITCKASQDVSTAVAWYQQKPGKAPKLLIYSASYRYTGVPDRFTGSGSGTDFTLTISSLQPEDFATYYCQQHYSTPPYTFGCGTKVEIKRGGGGSGGGGSGGGGSQVQLVQSGAEVKKPGASVKVSCKASGYAFSSSWMNWVRQAPGQCLEWIGRIYPGDADAKYNAKFKGKATLTADKSTSTAYMELSSLRSEDTAVYYCARSTMIATGAMDYWGQGTLVTVSSSGGGGSQVQLVQSGAEVKKPGASVKVSCKASGYTFTNHIIHWVRQAPGQCLEWMGYINPYPGYHAYNEKFQGRATMTSDTSTSTVYMELSSLRSEDTAVYYCARDGYYRDTDVLDYWGQGTLVTVSSGGGGSGGGGSGGGGSDIQMTQSPSSLSASVGDRVTITCQASQDISNYLNWYQQKPGKAPKLLIYYTSRLHTGVPSRFSGSGSGTDFTFTISSLEPEDIATYYCQQGNTLPWTFGCGTKVEIKSGGGGSEVQLVESGGGLVQPGGSLKLSCAASGFTFNKYAMNWVRQAPGKGMEWVARIRSKYNNYATYYADAVKDRFTISRDDSKNTLYLQMNNLKTEDTAVYYCVRAGNFGSSYISYFAYWGQGTLVTVSSGGGGSGGGGSGGGGSQTVVTQEPSLTVSPGGTVTITCGSSTGAVTSGNYPNWIQKKPGQAPRGLIGGTKFLAPGTPARFSGSLEGGKAALTLSGVQPEDEAEYYCVLYYSNRWVFGSGTKLTVLGGGGDKTHTCPPCPAPELLGGPSVFLFPPKPKDTLMISRTPEVTCVVVDVSHEDPEVKFNWYVDGVEVHNAKTKPCEEQYGSTYRCVSVLTVLHQDWLNGKEYKCKVSNKALPAPIEKTISKAKGQPREPQVYTLPPSREEMTKNQVSLTCLVKGFYPSDIAVEWESNGQPENNYKTTPPVLDSDGSFFLYSKLTVDKSRWQQGNVFSCSVMHEALHNHYTQKSLSLSPGKGGGGSGGGGSGGGGSGGGGSGGGGSGGGGSDKTHTCPPCPAPELLGGPSVFLFPPKPKDTLMISRTPEVTCVVVDVSHEDPEVKFNWYVDGVEVHNAKTKPCEEQYGSTYRCVSVLTVLHQDWLNGKEYKCKVSNKALPAPIEKTISKAKGQPREPQVYTLPPSREEMTKNQVSLTCLVKGFYPSDIAVEWESNGQPENNYKTTPPVLDSDGSFFLYSKLTVDKSRWQQGNVFSCSVMHEALHNHYTQKSLSLSPGK

SEQ ID NO: 2521 - protein, 1236 aa, Artificial Sequence
  Synthetic
DIQMTQSPSSLSASVGDRVTITCKASQDVSTAVAWYQQKPGKAPKLLIYSASYRYTGVPDRFTGSGSGTDFTLTISSLQPEDFATYYCQQHYSTPPYTFGCGTKVEIKRGGGGSGGGGSGGGGSQVQLVQSGAEVKKPGASVKVSCKASGYAFSSSWMNWVRQAPGQCLEWIGRIYPGDADAKYNAKFKGKATLTADKSTSTAYMELSSLRSEDTAVYYCARSTMIATGAMDYWGQGTLVTVSSSGGGGSQVQLVQSGAEVKKPGASVKVSCKASGYTFTNHIIHWVRQAPGQCLEWMGYINPYPGYHAYNEKFQGRATMTSDTSTSTVYMELSSLRSEDTAVYYCARDGYYRDTDVLDYWGQGTLVTVSSGGGGSGGGGSGGGGSDIQMTQSPSSLSASVGDRVTITCQASQDISNYLNWYQQKPGKAPKLLIYYTSRLHTGVPSRFSGSGSGTDFTFTISSLEPEDIATYYCQQGNTLPWTFGCGTKVEIKSGGGGSEVQLVESGGGLVQPGGSLKLSCAASGFTFNKYAINWVREAPGKGLEWVARIRSKYNNYATYYADAVKDRFTISRDDSKNTAYLQMNNLKTEDTAVYYCVRNANFGTSYISYFAYWGQGTLVTVSSGGGGSGGGGSGGGGSQTVVTQEPSLTVSPGGTVTLTCGSSTGAVTSGNYPNWVQKKPGQAPRGLIGGTKFLAPGTPARFSGSLLGGKAALTLSGVQPEDEAEYYCVLWYSNRWVFGSGTKLTVLGGGGDKTHTCPPCPAPELLGGPSVFLFPPKPKDTLMISRTPEVTCVVVDVSHEDPEVKFNWYVDGVEVHNAKTKPCEEQYGSTYRCVSVLTVLHQDWLNGKEYKCKVSNKALPAPIEKTISKAKGQPREPQVYTLPPSREEMTKNQVSLTCLVKGFYPSDIAVEWESNGQPENNYKTTPPVLDSDGSFFLYSKLTVDKSRWQQGNVFSCSVMHEALHNHYTQKSLSLSPGKGGGGSGGGGSGGGGSGGGGSGGGGSGGGGSDKTHTCPPCPAPELLGGPSVFLFPPKPKDTLMISRTPEVTCVVVDVSHEDPEVKFNWYVDGVEVHNAKTKPCEEQYGSTYRCVSVLTVLHQDWLNGKEYKCKVSNKALPAPIEKTISKAKGQPREPQVYTLPPSREEMTKNQVSLTCLVKGFYPSDIAVEWESNGQPENNYKTTPPVLDSDGSFFLYSKLTVDKSRWQQGNVFSCSVMHEALHNHYTQKSLSLSPGK

SEQ ID NO: 2522 - protein, 1236 aa, Artificial Sequence
  Synthetic
DIQMTQSPSSLSASVGDRVTITCKASQDVSTAVAWYQQKPGKAPKLLIYSASYRYTGVPDRFTGSGSGTDFTLTISSLQPEDFATYYCQQHYSTPPYTFGCGTKVEIKRGGGGSGGGGSGGGGSQVQLVQSGAEVKKPGASVKVSCKASGYAFSSSWMNWVRQAPGQCLEWIGRIYPGDADAKYNAKFKGKATLTADKSTSTAYMELSSLRSEDTAVYYCARSTMIATGAMDYWGQGTLVTVSSSGGGGSQVQLVQSGAEVKKPGASVKVSCKASGYTFTNHIIHWVRQAPGQCLEWMGYINPYPGYHAYNEKFQGRATMTSDTSTSTVYMELSSLRSEDTAVYYCARDGYYRDTDVLDYWGQGTLVTVSSGGGGSGGGGSGGGGSDIQMTQSPSSLSASVGDRVTITCQASQDISNYLNWYQQKPGKAPKLLIYYTSRLHTGVPSRFSGSGSGTDFTFTISSLEPEDIATYYCQQGNTLPWTFGCGTKVEIKSGGGGSEVQLVESGGGLVQPGGSLKLSCAASGFTFNKYAMNWVRQAPGKGMEWVARIRSKYNNYATYYADAVKDRFTISRDDSKNTLYLQMNNLKTEDTAVYYCVRAGNFGTSYISYWAYWGQGTLVTVSSGGGGSGGGGSGGGGSQTVVTQEPSLTVSPGGTVTITCGSSTGAVTSGNYPNWVQKKPGQAPRGLIGGTKFLAPGTPARFSGSLSGGKAALTLSGVQPEDEAEYYCVLWYSNRWVFGSGTKLTVLGGGGDKTHTCPPCPAPELLGGPSVFLFPPKPKDTLMISRTPEVTCVVVDVSHEDPEVKFNWYVDGVEVHNAKTKPCEEQYGSTYRCVSVLTVLHQDWLNGKEYKCKVSNKALPAPIEKTISKAKGQPREPQVYTLPPSREEMTKNQVSLTCLVKGFYPSDIAVEWESNGQPENNYKTTPPVLDSDGSFFLYSKLTVDKSRWQQGNVFSCSVMHEALHNHYTQKSLSLSPGKGGGGSGGGGSGGGGSGGGGSGGGGSGGGGSDKTHTCPPCPAPELLGGPSVFLFPPKPKDTLMISRTPEVTCVVVDVSHEDPEVKFNWYVDGVEVHNAKTKPCEEQYGSTYRCVSVLTVLHQDWLNGKEYKCKVSNKALPAPIEKTISKAKGQPREPQVYTLPPSREEMTKNQVSLTCLVKGFYPSDIAVEWESNGQPENNYKTTPPVLDSDGSFFLYSKLTVDKSRWQQGNVFSCSVMHEALHNHYTQKSLSLSPGK

SEQ ID NO: 2523 - protein, 1242 aa, Artificial Sequence
  Synthetic
QVTLKESGPTLVKPTETLTLTCTLSGFSLNNARMGVSWIRQPPGKCLEWLAHIFSNDEKSYSTSLKNRLTISKDSSKTQVVLTMTNVDPVDTATYYCARIVGYGSGWYGFFDYWGQGTLVTVSSGGGGSGGGGSGGGGSDIQMTQSPSSLSASVGDRVTITCRASQGIRNDLGWYQQKPGKAPKRLIYAASTLQSGVPSRFSGSGSGTEFTLTISSLQPEDFATYYCLQHNSYPLTFGCGTKVEIKSGGGGSEVQLLESGGGLVQPGGSLRLSCAASGFTFSHYAMSWVRQAPGKCLEWVSAVSGGGDKTLYADAVKGRFTISRDNSKNTLFLQMNSLRAEDTAIYYCARLRGFYYGMDVWGQGTTVTVSSGGGGSGGGGSGGGGSDIVLTQSPLSLPVTPGEPASISCRSSQSLLHSNKYNYLDWYLQKPGQSPQLLIYLGSNRASGVPDRFSGSGSGTDFTLKISRVEAEDVGVYYCMQALQTPPITFGCGTRLEIKSGGGGSEVQLVESGGGLVQPGGSLKLSCAASGFTFNKYAMNWVRQAPGKGLEWVARIRSKYNNYATYYADSVKDRFTISRDDSKNTAYLQMNNLKTEDTAVYYCVRHGNFGNSYISYWAYWGQGTLVTVSSGGGGSGGGGSGGGGSQTVVTQEPSLTVSPGGTVTLTCGSSTGAVTSGNYPNWVQQKPGQAPRGLIGGTKFLAPGTPARFSGSLLGGKAALTLSGVQPEDEAEYYCVLWYSNRWVFGGGTKLTVLGGGGDKTHTCPPCPAPELLGGPSVFLFPPKPKDTLMISRTPEVTCVVVDVSHEDPEVKFNWYVDGVEVHNAKTKPCEEQYGSTYRCVSVLTVLHQDWLNGKEYKCKVSNKALPAPIEKTISKAKGQPREPQVYTLPPSREEMTKNQVSLTCLVKGFYPSDIAVEWESNGQPENNYKTTPPVLDSDGSFFLYSKLTVDKSRWQQGNVFSCSVMHEALHNHYTQKSLSLSPGKGGGGSGGGGSGGGGSGGGGSGGGGSGGGGSDKTHTCPPCPAPELLGGPSVFLFPPKPKDTLMISRTPEVTCVVVDVSHEDPEVKFNWYVDGVEVHNAKTKPCEEQYGSTYRCVSVLTVLHQDWLNGKEYKCKVSNKALPAPIEKTISKAKGQPREPQVYTLPPSREEMTKNQVSLTCLVKGFYPSDIAVEWESNGQPENNYKTTPPVLDSDGSFFLYSKLTVDKSRWQQGNVFSCSVMHEALHNHYTQKSLSLSPGK

SEQ ID NO: 2524 - protein, 1242 aa, Artificial Sequence
  Synthetic
QVTLKESGPTLVKPTETLTLTCTLSGFSLNNARMGVSWIRQPPGKCLEWLAHIFSNDEKSYSTSLKNRLTISKDSSKTQVVLTMTNVDPVDTATYYCARIVGYGSGWYGFFDYWGQGTLVTVSSGGGGSGGGGSGGGGSDIQMTQSPSSLSASVGDRVTITCRASQGIRNDLGWYQQKPGKAPKRLIYAASTLQSGVPSRFSGSGSGTEFTLTISSLQPEDFATYYCLQHNSYPLTFGCGTKVEIKSGGGGSEVQLLESGGGLVQPGGSLRLSCAASGFTFSHYAMSWVRQAPGKCLEWVSAVSGGGDKTLYADAVKGRFTISRDNSKNTLFLQMNSLRAEDTAIYYCARLRGFYYGMDVWGQGTTVTVSSGGGGSGGGGSGGGGSDIVLTQSPLSLPVTPGEPASISCRSSQSLLHSNKYNYLDWYLQKPGQSPQLLIYLGSNRASGVPDRFSGSGSGTDFTLKISRVEAEDVGVYYCMQALQTPPITFGCGTRLEIKSGGGGSEVQLVESGGGLVQPGGSLKLSCAASGFTFNKYAINWVRQAPGKGLEWVARIRSKYNNYATYYADAVKDRFTISRDDSKNTVYLQMNNLKTEDTAVYYCARAGNFGSSYISYWAYWGQGTLVTVSSGGGGSGGGGSGGGGSQTVVTQEPSLTVSPGGTVTITCGSSTGAVTSGNYPNWVQKKPGQAPRGLIGGTKFLAPGTPARFSGSLSGGKAALTLSGVQPEDEAEYYCVLWYSNRWVFGSGTKLTVLGGGGDKTHTCPPCPAPELLGGPSVFLFPPKPKDTLMISRTPEVTCVVVDVSHEDPEVKFNWYVDGVEVHNAKTKPCEEQYGSTYRCVSVLTVLHQDWLNGKEYKCKVSNKALPAPIEKTISKAKGQPREPQVYTLPPSREEMTKNQVSLTCLVKGFYPSDIAVEWESNGQPENNYKTTPPVLDSDGSFFLYSKLTVDKSRWQQGNVFSCSVMHEALHNHYTQKSLSLSPGKGGGGSGGGGSGGGGSGGGGSGGGGSGGGGSDKTHTCPPCPAPELLGGPSVFLFPPKPKDTLMISRTPEVTCVVVDVSHEDPEVKFNWYVDGVEVHNAKTKPCEEQYGSTYRCVSVLTVLHQDWLNGKEYKCKVSNKALPAPIEKTISKAKGQPREPQVYTLPPSREEMTKNQVSLTCLVKGFYPSDIAVEWESNGQPENNYKTTPPVLDSDGSFFLYSKLTVDKSRWQQGNVFSCSVMHEALHNHYTQKSLSLSPGK

SEQ ID NO: 2525 - protein, 1242 aa, Artificial Sequence
  Synthetic
QVTLKESGPTLVKPTETLTLTCTLSGFSLNNARMGVSWIRQPPGKCLEWLAHIFSNDEKSYSTSLKNRLTISKDSSKTQVVLTMTNVDPVDTATYYCARIVGYGSGWYGFFDYWGQGTLVTVSSGGGGSGGGGSGGGGSDIQMTQSPSSLSASVGDRVTITCRASQGIRNDLGWYQQKPGKAPKRLIYAASTLQSGVPSRFSGSGSGTEFTLTISSLQPEDFATYYCLQHNSYPLTFGCGTKVEIKSGGGGSEVQLLESGGGLVQPGGSLRLSCAASGFTFSHYAMSWVRQAPGKCLEWVSAVSGGGDKTLYADAVKGRFTISRDNSKNTLFLQMNSLRAEDTAIYYCARLRGFYYGMDVWGQGTTVTVSSGGGGSGGGGSGGGGSDIVLTQSPLSLPVTPGEPASISCRSSQSLLHSNKYNYLDWYLQKPGQSPQLLIYLGSNRASGVPDRFSGSGSGTDFTLKISRVEAEDVGVYYCMQALQTPPITFGCGTRLEIKSGGGGSEVQLVESGGGLVQPGGSLKLSCAASGFTFNKYAMNWVRQAPGKGLEWVARIRSKYNNYATYYAEAVKGRFTISRDDSKNTVYLQMNNLKTEDTAVYYCVRNENIGTSYISYWAYWGQGTLVTVSSGGGGSGGGGSGGGGSQTVVTQEPSLTVSPGGTVTITCGSSTGAVTSGNYPNWVQQKPGQAPRGLIGGTKFLAPGTPARFSGSLSGGKAALTLSGVQPEDEAEYYCVLWYSNRWVFGSGTKLTVLGGGGDKTHTCPPCPAPELLGGPSVFLFPPKPKDTLMISRTPEVTCVVVDVSHEDPEVKFNWYVDGVEVHNAKTKPCEEQYGSTYRCVSVLTVLHQDWLNGKEYKCKVSNKALPAPIEKTISKAKGQPREPQVYTLPPSREEMTKNQVSLTCLVKGFYPSDIAVEWESNGQPENNYKTTPPVLDSDGSFFLYSKLTVDKSRWQQGNVFSCSVMHEALHNHYTQKSLSLSPGKGGGGSGGGGSGGGGSGGGGSGGGGSGGGGSDKTHTCPPCPAPELLGGPSVFLFPPKPKDTLMISRTPEVTCVVVDVSHEDPEVKFNWYVDGVEVHNAKTKPCEEQYGSTYRCVSVLTVLHQDWLNGKEYKCKVSNKALPAPIEKTISKAKGQPREPQVYTLPPSREEMTKNQVSLTCLVKGFYPSDIAVEWESNGQPENNYKTTPPVLDSDGSFFLYSKLTVDKSRWQQGNVFSCSVMHEALHNHYTQKSLSLSPGK

SEQ ID NO: 2526 - protein, 1242 aa, Artificial Sequence
  Synthetic
QVTLKESGPTLVKPTETLTLTCTLSGFSLNNARMGVSWIRQPPGKCLEWLAHIFSNDEKSYSTSLKNRLTISKDSSKTQVVLTMTNVDPVDTATYYCARIVGYGSGWYGFFDYWGQGTLVTVSSGGGGSGGGGSGGGGSDIQMTQSPSSLSASVGDRVTITCRASQGIRNDLGWYQQKPGKAPKRLIYAASTLQSGVPSRFSGSGSGTEFTLTISSLQPEDFATYYCLQHNSYPLTFGCGTKVEIKSGGGGSEVQLLESGGGLVQPGGSLRLSCAASGFTFSHYAMSWVRQAPGKCLEWVSAVSGGGDKTLYADAVKGRFTISRDNSKNTLFLQMNSLRAEDTAIYYCARLRGFYYGMDVWGQGTTVTVSSGGGGSGGGGSGGGGSDIVLTQSPLSLPVTPGEPASISCRSSQSLLHSNKYNYLDWYLQKPGQSPQLLIYLGSNRASGVPDRFSGSGSGTDFTLKISRVEAEDVGVYYCMQALQTPPITFGCGTRLEIKSGGGGSEVQLVESGGGLVQPGGSLKLSCAASGFTFNKYAMNWVRQAPGKGMEWVARIRSKYNNYATYYADAVKDRFTISRDDSKNTLYLQMNNLKTEDTAVYYCVRAGNFGSSYISYFAYWGQGTLVTVSSGGGGSGGGGSGGGGSQTVVTQEPSLTVSPGGTVTITCGSSTGAVTSGNYPNWIQKKPGQAPRGLIGGTKFLAPGTPARFSGSLEGGKAALTLSGVQPEDEAEYYCVLYYSNRWVFGSGTKLTVLGGGGDKTHTCPPCPAPELLGGPSVFLFPPKPKDTLMISRTPEVTCVVVDVSHEDPEVKFNWYVDGVEVHNAKTKPCEEQYGSTYRCVSVLTVLHQDWLNGKEYKCKVSNKALPAPIEKTISKAKGQPREPQVYTLPPSREEMTKNQVSLTCLVKGFYPSDIAVEWESNGQPENNYKTTPPVLDSDGSFFLYSKLTVDKSRWQQGNVFSCSVMHEALHNHYTQKSLSLSPGKGGGGSGGGGSGGGGSGGGGSGGGGSGGGGSDKTHTCPPCPAPELLGGPSVFLFPPKPKDTLMISRTPEVTCVVVDVSHEDPEVKFNWYVDGVEVHNAKTKPCEEQYGSTYRCVSVLTVLHQDWLNGKEYKCKVSNKALPAPIEKTISKAKGQPREPQVYTLPPSREEMTKNQVSLTCLVKGFYPSDIAVEWESNGQPENNYKTTPPVLDSDGSFFLYSKLTVDKSRWQQGNVFSCSVMHEALHNHYTQKSLSLSPGK

SEQ ID NO: 2527 - protein, 1242 aa, Artificial Sequence
  Synthetic
QVTLKESGPTLVKPTETLTLTCTLSGFSLNNARMGVSWIRQPPGKCLEWLAHIFSNDEKSYSTSLKNRLTISKDSSKTQVVLTMTNVDPVDTATYYCARIVGYGSGWYGFFDYWGQGTLVTVSSGGGGSGGGGSGGGGSDIQMTQSPSSLSASVGDRVTITCRASQGIRNDLGWYQQKPGKAPKRLIYAASTLQSGVPSRFSGSGSGTEFTLTISSLQPEDFATYYCLQHNSYPLTFGCGTKVEIKSGGGGSEVQLLESGGGLVQPGGSLRLSCAASGFTFSHYAMSWVRQAPGKCLEWVSAVSGGGDKTLYADAVKGRFTISRDNSKNTLFLQMNSLRAEDTAIYYCARLRGFYYGMDVWGQGTTVTVSSGGGGSGGGGSGGGGSDIVLTQSPLSLPVTPGEPASISCRSSQSLLHSNKYNYLDWYLQKPGQSPQLLIYLGSNRASGVPDRFSGSGSGTDFTLKISRVEAEDVGVYYCMQALQTPPITFGCGTRLEIKSGGGGSEVQLVESGGGLVQPGGSLKLSCAASGFTFNKYAMNWVRQAPGKGMEWVARIRSKYNNYATYYADAVKDRFTISRDDSKNTLYLQMNNLKTEDTAVYYCVRAGNFGTSYISYWAYWGQGTLVTVSSGGGGSGGGGSGGGGSQTVVTQEPSLTVSPGGTVTITCGSSTGAVTSGNYPNWVQKKPGQAPRGLIGGTKFLAPGTPARFSGSLSGGKAALTLSGVQPEDEAEYYCVLWYSNRWVFGSGTKLTVLGGGGDKTHTCPPCPAPELLGGPSVFLFPPKPKDTLMISRTPEVTCVVVDVSHEDPEVKFNWYVDGVEVHNAKTKPCEEQYGSTYRCVSVLTVLHQDWLNGKEYKCKVSNKALPAPIEKTISKAKGQPREPQVYTLPPSREEMTKNQVSLTCLVKGFYPSDIAVEWESNGQPENNYKTTPPVLDSDGSFFLYSKLTVDKSRWQQGNVFSCSVMHEALHNHYTQKSLSLSPGKGGGGSGGGGSGGGGSGGGGSGGGGSGGGGSDKTHTCPPCPAPELLGGPSVFLFPPKPKDTLMISRTPEVTCVVVDVSHEDPEVKFNWYVDGVEVHNAKTKPCEEQYGSTYRCVSVLTVLHQDWLNGKEYKCKVSNKALPAPIEKTISKAKGQPREPQVYTLPPSREEMTKNQVSLTCLVKGFYPSDIAVEWESNGQPENNYKTTPPVLDSDGSFFLYSKLTVDKSRWQQGNVFSCSVMHEALHNHYTQKSLSLSPGK

SEQ ID NO: 2528 - protein, 1242 aa, Artificial Sequence
  Synthetic
QVTLKESGPTLVKPTETLTLTCTLSGFSLNNARMGVSWIRQPPGKCLEWLAHIFSNDEKSYSTSLKNRLTISKDSSKTQVVLTMTNVDPVDTATYYCARIVGYGSGWYGFFDYWGQGTLVTVSSGGGGSGGGGSGGGGSDIQMTQSPSSLSASVGDRVTITCRASQGIRNDLGWYQQKPGKAPKRLIYAASTLQSGVPSRFSGSGSGTEFTLTISSLQPEDFATYYCLQHNSYPLTFGCGTKVEIKSGGGGSEVQLLESGGGLVQPGGSLRLSCAASGFTFSHYAMSWVRQAPGKCLEWVSAVSGGGDKTLYADAVKGRFTISRDNSKNTLFLQMNSLRAEDTAIYYCARLRGFYYGMDVWGQGTTVTVSSGGGGSGGGGSGGGGSDIVLTQSPLSLPVTPGEPASISCRSSQSLLHSNKYNYLDWYLQKPGQSPQLLIYLGSNRASGVPDRFSGSGSGTDFTLKISRVEAEDVGVYYCMQALQTPPITFGCGTRLEIKSGGGGSEVQLVESGGGLVQPGGSLKLSCAASGFTFNKYAINWVREAPGKGLEWVARIRSKYNNYATYYADAVKDRFTISRDDSKNTAYLQMNNLKTEDTAVYYCVRNANFGTSYISYFAYWGQGTLVTVSSGGGGSGGGGSGGGGSQTVVTQEPSLTVSPGGTVTLTCGSSTGAVTSGNYPNWVQKKPGQAPRGLIGGTKFLAPGTPARFSGSLLGGKAALTLSGVQPEDEAEYYCVLWYSNRWVFGSGTKLTVLGGGGDKTHTCPPCPAPELLGGPSVFLFPPKPKDTLMISRTPEVTCVVVDVSHEDPEVKFNWYVDGVEVHNAKTKPCEEQYGSTYRCVSVLTVLHQDWLNGKEYKCKVSNKALPAPIEKTISKAKGQPREPQVYTLPPSREEMTKNQVSLTCLVKGFYPSDIAVEWESNGQPENNYKTTPPVLDSDGSFFLYSKLTVDKSRWQQGNVFSCSVMHEALHNHYTQKSLSLSPGKGGGGSGGGGSGGGGSGGGGSGGGGSGGGGSDKTHTCPPCPAPELLGGPSVFLFPPKPKDTLMISRTPEVTCVVVDVSHEDPEVKFNWYVDGVEVHNAKTKPCEEQYGSTYRCVSVLTVLHQDWLNGKEYKCKVSNKALPAPIEKTISKAKGQPREPQVYTLPPSREEMTKNQVSLTCLVKGFYPSDIAVEWESNGQPENNYKTTPPVLDSDGSFFLYSKLTVDKSRWQQGNVFSCSVMHEALHNHYTQKSLSLSPGK

SEQ ID NO: 2529 - protein, 1474 aa, Artificial Sequence
  Synthetic
QVQLVQSGAEVKKPGASVKVSCKASGYTFTNYWMNWVRQAPGQCLEWMGNIAYGVKGTNYNQKFQGRVTMTVDTSSSTAYMELSRLRSDDTAVYYCATRYFYVMDYWGQGTLVTVSSGGGGQGGGGQGGGGQDIQMTQSPSSLSASVGDRVTITCRASQDISNYLNWYQQKPGKVPKLLIYYTSRLHSGVPSRFSGSGSGTDFTLTISSLQPEDVATYYCVQYAQFPLTFGCGTKVEIKSGGGGQEVQLVESGGGLVQPGGSLKLSCAASGFTFNKYAMNWVRQAPGKGMEWVARIRSKYNNYATYYADAVKDRFTISRDDSKNTLYLQMNNLKTEDTAVYYCVRAGNFGSSYISYFAYWGQGTLVTVSSGGGGQGGGGQGGGGQQTVVTQEPSLTVSPGGTVTITCGSSTGAVTSGNYPNWIQKKPGQAPRGLIGGTKFLAPGTPARFSGSLEGGKAALTLSGVQPEDEAEYYCVLYYSNRWVFGSGTKLTVLGGGGCPPCPAPELLGGPSVFLFPPKPKDTLMISRTPEVTCVVVDVSHEEPEVKFNWYVDGVEVHNAKTKPCEEQYGSTYRCVSVLTVLHQDWLNGKEYKCKVSNKALPAPIEKTISKAKGQPREPQVYTLPPSREEMTKNQVSLTCLVKGFYPSDIAVEWESNGQPENNYKTTPPVLDSDGSFFLYSKLTVDKSRWQQGNVFSCSVMHEALHNHYTQKSLSLSPGKGGGGQGGGGQGGGGQGGGGQGGGGQGGGGQCPPCPAPELLGGPSVFLFPPKPKDTLMISRTPEVTCVVVDVSHEEPEVKFNWYVDGVEVHNAKTKPCEEQYGSTYRCVSVLTVLHQDWLNGKEYKCKVSNKALPAPIEKTISKAKGQPREPQVYTLPPSREEMTKNQVSLTCLVKGFYPSDIAVEWESNGQPENNYKTTPPVLDSDGSFFLYSKLTVDKSRWQQGNVFSCSVMHEALHNHYTQKSLSLSPGKGGGGQVQLQESGPGLVKPSETLSLTCTVSGGSISSSSYFWGWIRQPPGKCLEWIGNIYYSGSSNYNPSLKSRVTISVDTSKNQFSLKLSSVTAADTAVYYCARLPRGDRDAFDIWGQGTMVTVSSGGGGQGGGGQGGGGQDIVMTQSPSSLSASVGDRVTITCRASQGISNYLAWYQQKPGKVPKLLIYAASTLQSGVPSRFSGSGSGTDFTLTISSLQPEDFATYYCQQSYSTPFTFGCGTKVEIKSGGGGQEVQLVESGGGLVQPGGSLKLSCAASGFTFNKYAMNWVRQAPGKGMEWVARIRSKYNNYATYYADAVKDRFTISRDDSKNTLYLQMNNLKTEDTAVYYCVRAGNFGSSYISYFAYWGQGTLVTVSSGGGGQGGGGQGGGGQQTVVTQEPSLTVSPGGTVTITCGSSTGAVTSGNYPNWIQKKPGQAPRGLIGGTKFLAPGTPARFSGSLEGGKAALTLSGVQPEDEAEYYCVLYYSNRWVFGSGTKLTVL

SEQ ID NO: 2530 - protein, 1474 aa, Artificial Sequence
  Synthetic
QVQLVQSGAEVKKPGASVKVSCKASGYTFTNYWMNWVRQAPGQCLEWMGNIAYGVKGTNYNQKFQGRVTMTVDTSSSTAYMELSRLRSDDTAVYYCATRYFYVMDYWGQGTLVTVSSGGGGQGGGGQGGGGQDIQMTQSPSSLSASVGDRVTITCRASQDISNYLNWYQQKPGKVPKLLIYYTSRLHSGVPSRFSGSGSGTDFTLTISSLQPEDVATYYCVQYAQFPLTFGCGTKVEIKSGGGGQEVQLVESGGGLVQPGGSLKLSCAASGFTFNKYAINWVREAPGKGLEWVARIRSKYNNYATYYADAVKDRFTISRDDSKNTAYLQMNNLKTEDTAVYYCVRNANFGTSYISYFAYWGQGTLVTVSSGGGGSGGGGSGGGGSQTVVTQEPSLTVSPGGTVTLTCGSSTGAVTSGNYPNWVQKKPGQAPRGLIGGTKFLAPGTPARFSGSLLGGKAALTLSGVQPEDEAEYYCVLWYSNRWVFGSGTKLTVLGGGGCPPCPAPELLGGPSVFLFPPKPKDTLMISRTPEVTCVVVDVSHEEPEVKFNWYVDGVEVHNAKTKPCEEQYGSTYRCVSVLTVLHQDWLNGKEYKCKVSNKALPAPIEKTISKAKGQPREPQVYTLPPSREEMTKNQVSLTCLVKGFYPSDIAVEWESNGQPENNYKTTPPVLDSDGSFFLYSKLTVDKSRWQQGNVFSCSVMHEALHNHYTQKSLSLSPGKGGGGQGGGGQGGGGQGGGGQGGGGQGGGGQCPPCPAPELLGGPSVFLFPPKPKDTLMISRTPEVTCVVVDVSHEEPEVKFNWYVDGVEVHNAKTKPCEEQYGSTYRCVSVLTVLHQDWLNGKEYKCKVSNKALPAPIEKTISKAKGQPREPQVYTLPPSREEMTKNQVSLTCLVKGFYPSDIAVEWESNGQPENNYKTTPPVLDSDGSFFLYSKLTVDKSRWQQGNVFSCSVMHEALHNHYTQKSLSLSPGKGGGGQVQLQESGPGLVKPSETLSLTCTVSGGSISSSSYFWGWIRQPPGKCLEWIGNIYYSGSSNYNPSLKSRVTISVDTSKNQFSLKLSSVTAADTAVYYCARLPRGDRDAFDIWGQGTMVTVSSGGGGQGGGGQGGGGQDIVMTQSPSSLSASVGDRVTITCRASQGISNYLAWYQQKPGKVPKLLIYAASTLQSGVPSRFSGSGSGTDFTLTISSLQPEDFATYYCQQSYSTPFTFGCGTKVEIKSGGGGQEVQLVESGGGLVQPGGSLKLSCAASGFTFNKYAINWVREAPGKGLEWVARIRSKYNNYATYYADAVKDRFTISRDDSKNTAYLQMNNLKTEDTAVYYCVRNANFGTSYISYFAYWGQGTLVTVSSGGGGSGGGGSGGGGSQTVVTQEPSLTVSPGGTVTLTCGSSTGAVTSGNYPNWVQKKPGQAPRGLIGGTKFLAPGTPARFSGSLLGGKAALTLSGVQPEDEAEYYCVLWYSNRWVFGSGTKLTVL

SEQ ID NO: 2531 - protein, 1234 aa, Artificial Sequence
  Synthetic
QVQLVQSGAEVKKPGASVKVSCKASGYTFTGYYIHWVRQAPGQCLEWMGWINPNSGGTNYAQKFQGRVTMTRDTSISTAYMELSRLRSDDTAVYYCARVEAVAGREYYYFSGMDVWGQGTTVTVSSGGGGSGGGGSGGGGSSYELTQPPSVSVSPGQTASITCSGEKLGDKYVYWYQQKPGQSPVLVIYQSTKRPSGVPERFSGSNSGNTATLTISGTQAMDEADYYCQAYHASTAVFGCGTKLTVLSGGGGSEVQLLESGGGLVQPGGSLRLSCAASGFTFSSYWMHWVRQTPGKCLEWVSKIDPSDDYTNYNQKVKGRFTISIDKSKNTLYLQMNSLRAEDTAVYYCARWDYSHFDVWGQGTTVTVSSGGGGSGGGGSGGGGSEIVMTQSPATLSVSPGERATLTCRASSSVSYMHWYQQKPGQAPRLLIYGTSNLVSGVPARFSGSGSGTEFTLTISSLQSEDFAVYYCQQWSSYPLTFGCGTKVEIKSGGGGSEVQLVESGGGLVQPGGSLKLSCAASGFTFNKYAMNWVRQAPGKGLEWVARIRSKYNNYATYYADSVKDRFTISRDDSKNTAYLQMNNLKTEDTAVYYCVRHGNFGNSYISYWAYWGQGTLVTVSSGGGGSGGGGSGGGGSQTVVTQEPSLTVSPGGTVTLTCGSSTGAVTSGNYPNWVQQKPGQAPRGLIGGTKFLAPGTPARFSGSLLGGKAALTLSGVQPEDEAEYYCVLWYSNRWVFGGGTKLTVLGGGGDKTHTCPPCPAPELLGGPSVFLFPPKPKDTLMISRTPEVTCVVVDVSHEDPEVKFNWYVDGVEVHNAKTKPCEEQYGSTYRCVSVLTVLHQDWLNGKEYKCKVSNKALPAPIEKTISKAKGQPREPQVYTLPPSREEMTKNQVSLTCLVKGFYPSDIAVEWESNGQPENNYKTTPPVLDSDGSFFLYSKLTVDKSRWQQGNVFSCSVMHEALHNHYTQKSLSLSPGKGGGGSGGGGSGGGGSGGGGSGGGGSGGGGSDKTHTCPPCPAPELLGGPSVFLFPPKPKDTLMISRTPEVTCVVVDVSHEDPEVKFNWYVDGVEVHNAKTKPCEEQYGSTYRCVSVLTVLHQDWLNGKEYKCKVSNKALPAPIEKTISKAKGQPREPQVYTLPPSREEMTKNQVSLTCLVKGFYPSDIAVEWESNGQPENNYKTTPPVLDSDGSFFLYSKLTVDKSRWQQGNVFSCSVMHEALHNHYTQKSLSLSPGK

SEQ ID NO: 2532 - protein, 1234 aa, Artificial Sequence
  Synthetic
QVQLVQSGAEVKKPGASVKVSCKASGYTFTGYYIHWVRQAPGQCLEWMGWINPNSGGTNYAQKFQGRVTMTRDTSISTAYMELSRLRSDDTAVYYCARVEAVAGREYYYFSGMDVWGQGTTVTVSSGGGGSGGGGSGGGGSSYELTQPPSVSVSPGQTASITCSGEKLGDKYVYWYQQKPGQSPVLVIYQSTKRPSGVPERFSGSNSGNTATLTISGTQAMDEADYYCQAYHASTAVFGCGTKLTVLSGGGGSEVQLLESGGGLVQPGGSLRLSCAASGFTFSSYWMHWVRQTPGKCLEWVSKIDPSDDYTNYNQKVKGRFTISIDKSKNTLYLQMNSLRAEDTAVYYCARWDYSHFDVWGQGTTVTVSSGGGGSGGGGSGGGGSEIVMTQSPATLSVSPGERATLTCRASSSVSYMHWYQQKPGQAPRLLIYGTSNLVSGVPARFSGSGSGTEFTLTISSLQSEDFAVYYCQQWSSYPLTFGCGTKVEIKSGGGGSEVQLVESGGGLVQPGGSLKLSCAASGFTFNKYAINWVRQAPGKGLEWVARIRSKYNNYATYYADAVKDRFTISRDDSKNTVYLQMNNLKTEDTAVYYCARAGNFGSSYISYWAYWGQGTLVTVSSGGGGSGGGGSGGGGSQTVVTQEPSLTVSPGGTVTITCGSSTGAVTSGNYPNWVQKKPGQAPRGLIGGTKFLAPGTPARFSGSLSGGKAALTLSGVQPEDEAEYYCVLWYSNRWVFGSGTKLTVLGGGGDKTHTCPPCPAPELLGGPSVFLFPPKPKDTLMISRTPEVTCVVVDVSHEDPEVKFNWYVDGVEVHNAKTKPCEEQYGSTYRCVSVLTVLHQDWLNGKEYKCKVSNKALPAPIEKTISKAKGQPREPQVYTLPPSREEMTKNQVSLTCLVKGFYPSDIAVEWESNGQPENNYKTTPPVLDSDGSFFLYSKLTVDKSRWQQGNVFSCSVMHEALHNHYTQKSLSLSPGKGGGGSGGGGSGGGGSGGGGSGGGGSGGGGSDKTHTCPPCPAPELLGGPSVFLFPPKPKDTLMISRTPEVTCVVVDVSHEDPEVKFNWYVDGVEVHNAKTKPCEEQYGSTYRCVSVLTVLHQDWLNGKEYKCKVSNKALPAPIEKTISKAKGQPREPQVYTLPPSREEMTKNQVSLTCLVKGFYPSDIAVEWESNGQPENNYKTTPPVLDSDGSFFLYSKLTVDKSRWQQGNVFSCSVMHEALHNHYTQKSLSLSPGK

SEQ ID NO: 2533 - protein, 1234 aa, Artificial Sequence
  Synthetic
QVQLVQSGAEVKKPGASVKVSCKASGYTFTGYYIHWVRQAPGQCLEWMGWINPNSGGTNYAQKFQGRVTMTRDTSISTAYMELSRLRSDDTAVYYCARVEAVAGREYYYFSGMDVWGQGTTVTVSSGGGGSGGGGSGGGGSSYELTQPPSVSVSPGQTASITCSGEKLGDKYVYWYQQKPGQSPVLVIYQSTKRPSGVPERFSGSNSGNTATLTISGTQAMDEADYYCQAYHASTAVFGCGTKLTVLSGGGGSEVQLLESGGGLVQPGGSLRLSCAASGFTFSSYWMHWVRQTPGKCLEWVSKIDPSDDYTNYNQKVKGRFTISIDKSKNTLYLQMNSLRAEDTAVYYCARWDYSHFDVWGQGTTVTVSSGGGGSGGGGSGGGGSEIVMTQSPATLSVSPGERATLTCRASSSVSYMHWYQQKPGQAPRLLIYGTSNLVSGVPARFSGSGSGTEFTLTISSLQSEDFAVYYCQQWSSYPLTFGCGTKVEIKSGGGGSEVQLVESGGGLVQPGGSLKLSCAASGFTFNKYAMNWVRQAPGKGLEWVARIRSKYNNYATYYAEAVKGRFTISRDDSKNTVYLQMNNLKTEDTAVYYCVRNENIGTSYISYWAYWGQGTLVTVSSGGGGSGGGGSGGGGSQTVVTQEPSLTVSPGGTVTITCGSSTGAVTSGNYPNWVQQKPGQAPRGLIGGTKFLAPGTPARFSGSLSGGKAALTLSGVQPEDEAEYYCVLWYSNRWVFGSGTKLTVLGGGGDKTHTCPPCPAPELLGGPSVFLFPPKPKDTLMISRTPEVTCVVVDVSHEDPEVKFNWYVDGVEVHNAKTKPCEEQYGSTYRCVSVLTVLHQDWLNGKEYKCKVSNKALPAPIEKTISKAKGQPREPQVYTLPPSREEMTKNQVSLTCLVKGFYPSDIAVEWESNGQPENNYKTTPPVLDSDGSFFLYSKLTVDKSRWQQGNVFSCSVMHEALHNHYTQKSLSLSPGKGGGGSGGGGSGGGGSGGGGSGGGGSGGGGSDKTHTCPPCPAPELLGGPSVFLFPPKPKDTLMISRTPEVTCVVVDVSHEDPEVKFNWYVDGVEVHNAKTKPCEEQYGSTYRCVSVLTVLHQDWLNGKEYKCKVSNKALPAPIEKTISKAKGQPREPQVYTLPPSREEMTKNQVSLTCLVKGFYPSDIAVEWESNGQPENNYKTTPPVLDSDGSFFLYSKLTVDKSRWQQGNVFSCSVMHEALHNHYTQKSLSLSPGK

SEQ ID NO: 2534 - protein, 1234 aa, Artificial Sequence
  Synthetic
QVQLVQSGAEVKKPGASVKVSCKASGYTFTGYYIHWVRQAPGQCLEWMGWINPNSGGTNYAQKFQGRVTMTRDTSISTAYMELSRLRSDDTAVYYCARVEAVAGREYYYFSGMDVWGQGTTVTVSSGGGGSGGGGSGGGGSSYELTQPPSVSVSPGQTASITCSGEKLGDKYVYWYQQKPGQSPVLVIYQSTKRPSGVPERFSGSNSGNTATLTISGTQAMDEADYYCQAYHASTAVFGCGTKLTVLSGGGGSEVQLLESGGGLVQPGGSLRLSCAASGFTFSSYWMHWVRQTPGKCLEWVSKIDPSDDYTNYNQKVKGRFTISIDKSKNTLYLQMNSLRAEDTAVYYCARWDYSHFDVWGQGTTVTVSSGGGGSGGGGSGGGGSEIVMTQSPATLSVSPGERATLTCRASSSVSYMHWYQQKPGQAPRLLIYGTSNLVSGVPARFSGSGSGTEFTLTISSLQSEDFAVYYCQQWSSYPLTFGCGTKVEIKSGGGGSEVQLVESGGGLVQPGGSLKLSCAASGFTFNKYAMNWVRQAPGKGMEWVARIRSKYNNYATYYADAVKDRFTISRDDSKNTLYLQMNNLKTEDTAVYYCVRAGNFGSSYISYFAYWGQGTLVTVSSGGGGSGGGGSGGGGSQTVVTQEPSLTVSPGGTVTITCGSSTGAVTSGNYPNWIQKKPGQAPRGLIGGTKFLAPGTPARFSGSLEGGKAALTLSGVQPEDEAEYYCVLYYSNRWVFGSGTKLTVLGGGGDKTHTCPPCPAPELLGGPSVFLFPPKPKDTLMISRTPEVTCVVVDVSHEDPEVKFNWYVDGVEVHNAKTKPCEEQYGSTYRCVSVLTVLHQDWLNGKEYKCKVSNKALPAPIEKTISKAKGQPREPQVYTLPPSREEMTKNQVSLTCLVKGFYPSDIAVEWESNGQPENNYKTTPPVLDSDGSFFLYSKLTVDKSRWQQGNVFSCSVMHEALHNHYTQKSLSLSPGKGGGGSGGGGSGGGGSGGGGSGGGGSGGGGSDKTHTCPPCPAPELLGGPSVFLFPPKPKDTLMISRTPEVTCVVVDVSHEDPEVKFNWYVDGVEVHNAKTKPCEEQYGSTYRCVSVLTVLHQDWLNGKEYKCKVSNKALPAPIEKTISKAKGQPREPQVYTLPPSREEMTKNQVSLTCLVKGFYPSDIAVEWESNGQPENNYKTTPPVLDSDGSFFLYSKLTVDKSRWQQGNVFSCSVMHEALHNHYTQKSLSLSPGK

SEQ ID NO: 2535 - protein, 1234 aa, Artificial Sequence
  Synthetic
QVQLVQSGAEVKKPGASVKVSCKASGYTFTGYYIHWVRQAPGQCLEWMGWINPNSGGTNYAQKFQGRVTMTRDTSISTAYMELSRLRSDDTAVYYCARVEAVAGREYYYFSGMDVWGQGTTVTVSSGGGGSGGGGSGGGGSSYELTQPPSVSVSPGQTASITCSGEKLGDKYVYWYQQKPGQSPVLVIYQSTKRPSGVPERFSGSNSGNTATLTISGTQAMDEADYYCQAYHASTAVFGCGTKLTVLSGGGGSEVQLLESGGGLVQPGGSLRLSCAASGFTFSSYWMHWVRQTPGKCLEWVSKIDPSDDYTNYNQKVKGRFTISIDKSKNTLYLQMNSLRAEDTAVYYCARWDYSHFDVWGQGTTVTVSSGGGGSGGGGSGGGGSEIVMTQSPATLSVSPGERATLTCRASSSVSYMHWYQQKPGQAPRLLIYGTSNLVSGVPARFSGSGSGTEFTLTISSLQSEDFAVYYCQQWSSYPLTFGCGTKVEIKSGGGGSEVQLVESGGGLVQPGGSLKLSCAASGFTFNKYAMNWVRQAPGKGMEWVARIRSKYNNYATYYADAVKDRFTISRDDSKNTLYLQMNNLKTEDTAVYYCVRAGNFGTSYISYWAYWGQGTLVTVSSGGGGSGGGGSGGGGSQTVVTQEPSLTVSPGGTVTITCGSSTGAVTSGNYPNWVQKKPGQAPRGLIGGTKFLAPGTPARFSGSLSGGKAALTLSGVQPEDEAEYYCVLWYSNRWVFGSGTKLTVLGGGGDKTHTCPPCPAPELLGGPSVFLFPPKPKDTLMISRTPEVTCVVVDVSHEDPEVKFNWYVDGVEVHNAKTKPCEEQYGSTYRCVSVLTVLHQDWLNGKEYKCKVSNKALPAPIEKTISKAKGQPREPQVYTLPPSREEMTKNQVSLTCLVKGFYPSDIAVEWESNGQPENNYKTTPPVLDSDGSFFLYSKLTVDKSRWQQGNVFSCSVMHEALHNHYTQKSLSLSPGKGGGGSGGGGSGGGGSGGGGSGGGGSGGGGSDKTHTCPPCPAPELLGGPSVFLFPPKPKDTLMISRTPEVTCVVVDVSHEDPEVKFNWYVDGVEVHNAKTKPCEEQYGSTYRCVSVLTVLHQDWLNGKEYKCKVSNKALPAPIEKTISKAKGQPREPQVYTLPPSREEMTKNQVSLTCLVKGFYPSDIAVEWESNGQPENNYKTTPPVLDSDGSFFLYSKLTVDKSRWQQGNVFSCSVMHEALHNHYTQKSLSLSPGK

SEQ ID NO: 2536 - protein, 1234 aa, Artificial Sequence
  Synthetic
QVQLVQSGAEVKKPGASVKVSCKASGYTFTGYYIHWVRQAPGQCLEWMGWINPNSGGTNYAQKFQGRVTMTRDTSISTAYMELSRLRSDDTAVYYCARVEAVAGREYYYFSGMDVWGQGTTVTVSSGGGGSGGGGSGGGGSSYELTQPPSVSVSPGQTASITCSGEKLGDKYVYWYQQKPGQSPVLVIYQSTKRPSGVPERFSGSNSGNTATLTISGTQAMDEADYYCQAYHASTAVFGCGTKLTVLSGGGGSEVQLLESGGGLVQPGGSLRLSCAASGFTFSSYWMHWVRQTPGKCLEWVSKIDPSDDYTNYNQKVKGRFTISIDKSKNTLYLQMNSLRAEDTAVYYCARWDYSHFDVWGQGTTVTVSSGGGGSGGGGSGGGGSEIVMTQSPATLSVSPGERATLTCRASSSVSYMHWYQQKPGQAPRLLIYGTSNLVSGVPARFSGSGSGTEFTLTISSLQSEDFAVYYCQQWSSYPLTFGCGTKVEIKSGGGGSEVQLVESGGGLVQPGGSLKLSCAASGFTFNKYAINWVREAPGKGLEWVARIRSKYNNYATYYADAVKDRFTISRDDSKNTAYLQMNNLKTEDTAVYYCVRNANFGTSYISYFAYWGQGTLVTVSSGGGGSGGGGSGGGGSQTVVTQEPSLTVSPGGTVTLTCGSSTGAVTSGNYPNWVQKKPGQAPRGLIGGTKFLAPGTPARFSGSLLGGKAALTLSGVQPEDEAEYYCVLWYSNRWVFGSGTKLTVLGGGGDKTHTCPPCPAPELLGGPSVFLFPPKPKDTLMISRTPEVTCVVVDVSHEDPEVKFNWYVDGVEVHNAKTKPCEEQYGSTYRCVSVLTVLHQDWLNGKEYKCKVSNKALPAPIEKTISKAKGQPREPQVYTLPPSREEMTKNQVSLTCLVKGFYPSDIAVEWESNGQPENNYKTTPPVLDSDGSFFLYSKLTVDKSRWQQGNVFSCSVMHEALHNHYTQKSLSLSPGKGGGGSGGGGSGGGGSGGGGSGGGGSGGGGSDKTHTCPPCPAPELLGGPSVFLFPPKPKDTLMISRTPEVTCVVVDVSHEDPEVKFNWYVDGVEVHNAKTKPCEEQYGSTYRCVSVLTVLHQDWLNGKEYKCKVSNKALPAPIEKTISKAKGQPREPQVYTLPPSREEMTKNQVSLTCLVKGFYPSDIAVEWESNGQPENNYKTTPPVLDSDGSFFLYSKLTVDKSRWQQGNVFSCSVMHEALHNHYTQKSLSLSPGK

SEQ ID NO: 2537-2550 - skipped (14 entries)

SEQ ID NO: 2551 - protein, 15 aa, Artificial Sequence
  Synthetic
GGGGQGGGGQGGGGQ

SEQ ID NO: 2552 - protein, 105 aa, Artificial Sequence
  Synthetic
QDGNEEMGGITQTPYKVSISGTTVILTCPQYPGSEILWQHNDKNIGGDEDDKNIGSDEDHLSLKEFSELEQSGYYVCYPRGSKPEDANFYLYLRARVCENCMEMD

SEQ ID NO: 2553 - protein, 27 aa, Artificial Sequence
  Synthetic
QDGNEEMGGITQTPYKVSISGTTVILT

SEQ ID NO: 2554 - protein, 5 aa, Artificial Sequence
  Synthetic
KYAMN

SEQ ID NO: 2555 - protein, 19 aa, Artificial Sequence
  Synthetic
RIRSKYNNYATYYADSVKD

SEQ ID NO: 2556 - protein, 14 aa, Artificial Sequence
  Synthetic
AGNFGNSYISYWAY

SEQ ID NO: 2557 - protein, 14 aa, Artificial Sequence
  Synthetic
GSSTGAVTSGNYPN

SEQ ID NO: 2558 - protein, 7 aa, Artificial Sequence
  Synthetic
GTKFLAP

SEQ ID NO: 2559 - protein, 9 aa, Artificial Sequence
  Synthetic
VLWYSNRWV

SEQ ID NO: 2560 - protein, 125 aa, Artificial Sequence
  Synthetic
EVQLVESGGGLVQPGGSLKLSCAASGFTFNKYAMNWVRQAPGKGLEWVARIRSKYNNYATYYADSVKDRFTISRDDSKNTAYLQMNNLKTEDTAVYYCVRAGNFGNSYISYWAYWGQGTLVTVSS

SEQ ID NO: 2561 - protein, 109 aa, Artificial Sequence; identical to SEQ ID NO: 731
  Synthetic
